United States Patent Application Publication US 2026/0275333 A1 - sequence listing, part 5

SEQ ID NO: 3045 - RNA, 64444167 nt, Homo sapiens (residues 8,592,557-10,740,695 of 64,444,167)
  source 1..64444167: mol_type = mRNA
aaatatatattgcaactgaaggggcctgagagggtctttttttccccttggagaagccgaataaactgtgtgttgtgcacctgcattttgacggtgactcgtcacatgtgatcaggagtggaattttccactgtggcatcacatcatcactcaaaaagtttcagattttgaagcattcagattttggagttttggattcaggatgctcaatttgtatttctgtttttaatctagcagttacactgagggccaagactctatgttaaatgcccaccatatattatctgatttaaacatcacagtgatgctgcagggaaggccctgcagtggccattctcaatgctggctgcacattagggccccctgagcagctcatgagattccggaaacccaggctgcacccagtccagttaatcagaatctctgagggtgggatccaggcccctcattttttaaagcttccaggattttctatcacacagccagggttgagcctagattcatctgattccaagcccagatatttttgcctgctgagtaagtagtatagcccaggcctttccccatcttttgccccaactctctcactcacaggccctgccccccatatcttacacgcatacttagtttttaagagacagagtcttgctccgtcacccaggctggactgcagtggcaagatcatggctcactgcagcctcaacctcccaggttcaagcgatccttctgcttcagtctcccaagtagccaggactacctgcacaagccaccatgcccatctaatttgtgtgtgcgcgtgtgtgtgtgtgtgtgtatgtgtgaagacagggtcttgctctgtttcccaggctggccttcaactcctggcttcaagcaattctcctgacttagtctctcaaagtgctgggattacaagtgtgagccaccacacccagccccatgtaggcttttattcccagttacatttttgcccacaaaatgaaaattataaatttttgaagtccttagtataataccaatgataatctgacattgtttctactgaaaataaacattactgttattggcattttacttttgtttttattagattttttatttttatttttttaatggggtgagggaggtgtctttataagtaacagtgatagtaattttgcaatactaattttgataactaagaatgtatcattttatataccaggaattttatggactttgccttgcatgttttgtgacattttttcggggaagattctattatcaggaggaaactgaggcttactttctgcaaagacacagccctgacatttaagcccaaatctgtgttattttattttattttagaggcagaatcttgctctgttacccaggctagaatgcagtggtacaaacatagctcactgcagcctcaacctcctgggctcaagtgatcctccaccctcagcctcctaagtagctgagagtagagctgtgcaccaccattcccagttaatttaattttttgttatagacagggtcttgctatattgcccacgctggtcttgaacaccctgcctcaagcaatacttctggcctcaagcaatcctccacctcaacctcccgaagtgctaggactacaggcatgaaccctcatgcctagcccagatccatgttattttaggacatcagtttatagcttctgtttgatgtattctaaactcgaccgaaaataaaactctcttgagaaacttgttgccctcctgaaaattctgtctggaatgggacttagcaataggatttttaagtttggtccatggtgttcctgggctactccaccacgctacaatacattgccttcaatcagggcttctcaaacactcatgtgcttgcaagtcattggggatctggttaaaatgcagaacctgatgaagtaggttaggggcggtcctgagattctgcatccctacctagttcccaggagatgtgatgcttctggtccacaaaccacattttgagtagccacttagtgcctggtaacttaagttttctgagagcaaagttctgagagcactgttgattctccactcattgtagtgtctttttgcacattgacttgcaaaagctccttagtatatctttgaggaaaccaaaaaaaaaaaagcacttttaagacaatgacatcaatatgaactcagtgctttaagtgcattttataaatagcacagcagataaatcacctcttttagaaagaaaatatttaaccaagtgtaccttgtctccattagacactaagcacatctctaattcattcttagataacagagttccttacccaaattaggtgtttaaaaaggcatttcttaaaggaataaatcattttacaaacttttgaattgtttttaaattttgcatcccatattctaacaccgaggtgcctttttaaagatgcatctgtgaattttcattcaaaagtatatatagactacataacatatgcatcttaggtgtaatacaaagacatagaatatttaaaggcaattaatatgtctatacaaaatatttatttatttttttattatactttaagttttagggtacatgtgcacattgtgcaggttagttacatatgtatacatgtgccatgctggtacgctgcacccactaacttgtcatctagcattaggtatatctcccagtgctatccctcccccctccccccaccccacaacagtccccagagtgtgatattccgcttcctgtgtccatgtgatctcattgttcaattcccacctatgagcgagaatatgcggtgtttggttttttgttcttgcgatagtttactgagaatgatgatttccaatttcatccatgtccctacaaaggacatgaactcatcattttttatggctgcatagtattccatggtgtatatgtgccacattttcttaatccagtctatcattgttggacatttgggttggttccaagtctttgctattgtgaataatgccacaataaacatacgtgtgcatgtgtctttatagcagcatgatttatagtcctttgggtatatacccagtaatgggatggctgggtcaaatggtatttctagttctagatccctgaggagtcgccacactgacttccacaacggttgaactagtttacagtcccaccaacagtgtaaaagtgttcctatttctccacatcctctccagcacctgttgttccctgactttttaatgattgccattctaactggtgtgagatggtatctcattgtggttttgatttgcatttctctgatggccagtgatgatgagcattttttcatgtgttttttggctgcataaatgtcttcttttgagaagtgtctgttcatgtccttcgcccactttttgatggggttgtttgtttttttcttgtaaatttgtttgagttcattgtagattctggatattagccctgtgtcagatgagtaggttgcgaaaattttctcccattttgtaggttgcctgttcacactgatggtagtttcttttgctgtgcagaagctctttagtttaattagatcccatttgtcaattttgtcttttgttgccattgcttttggtgttttggacatgaagtccttgcccatgcctatatcccgaatggtaatgcctaggttttcttctagggttttatggttttaggtctaacgtttaagtctttaatccatcttgaattgatttttgtataaggtgtaagaaagggatccagtttcagctttctacatatggctagccagttttcccagcaccatttattaaatagggaatcctttccccattgcttgtttttctcaggtttgtcaaagatcagatagttgtagatatgcggcgttatttctgagggctctgttctgttccattgatctatatctctgttttggtaccagtaccatgctgttttggttactgtagccttgtagtatagtttgaagtcaggtagtgtgatgcctccagcttcgttcttttggcttaggattgccttggcgatgcgggctctttttttggttccatatgaactttaaagtagttttttccaattctgtgaagaaagtcattggtagctttatggggatggcattgaatctgtaaattaccttgggcagtatggccattttcatgatattgattcttcctacccatgagcatggaatgttcttccatttgtttgtatcctcttttatttccttgagcagtggtttgtagttctccttgaagaggtccttcacatcccttgtaagttggattcctaggtattttattctctttgaagcaattgtgaatgggagttcactcatgatttggctctctgtttgtctgttgttggtgtataagaatgcttgtgatttttgcacgttgattttgtatcctgagactttgctgaagttgcttatcagcttaaggagattttgggctgagacaatggggttttctagatatacagtcatgtcgtctgcgaacagggacaatttgacttcctcttttcctaattgaataccctttatttccttctcctgcctaattgccctggccagaacttccaacactatgttgaataggagtggtgagagagggcatccctgtcttgtgccagttttcaaagggaatgcttccagtttttgcccatttagtatgatattggctgtgggtttgtcatagatagctcttattattttgaaatacgtcccatcaatacctaatttattgagagtttttagcatgaagggttgttgaattttgtcaaaggccttttctgcatctattgagataatcatgtggtttttgtctttggctctgtttatatgctggattacatttattgatttgcgtatattgaaccagccttgcatcccagggatgaagcccacttgatcatggtggataagctttttgatgtgctgctggattcattttgccagtattttattgaggatttttgcatcaatgttcatcaaggatattggtctaaaattctcttttttggttgtgtctctgcccggctttggtattagaatgatgctagcctcataaaatgagttagggaggattccctctttttctattgattggaatagtttcagaaggaatggtaccagttcctccttgtacctctggtagaattcggctgtgaatccatctggtcctggactctttttggttggtaaactattgattattgccacaatttcagctcctgttattggtctattcagagattcaacttcttcctggtttagtcttgggagagtgtatgtgtcgaggaatttatccatttcttctagattttctagtttatttgcatagaggtgtttgtagtattctctgatggtagtttgtatttctgtgggatcggtggtgatatcccctttatcattttttattgtgtctatttgattcttctctttttctttattagtcttgctagcggtctatcaattttgttgatcctttcaaaaaaccagctcctggattcattaattttttgaagggttttttgtgtctctatttccttcagttctgctctgattttagttatttcttgccttctgctagcttttgaatgtgtttgctcttgcttttctagttcttttaattgtgatgttagggtgtcaattttggatctttcctgctttctcttgtgggcatttagtgctataaatttccctctacacactgctttgaatgcatcccagagattctggtatgttgtgtctttgttctcgttggtttcaaagaacatctttatttctgccttcatttcgtcatgtatccagtagtcattcaggagcaggttgttcagtttccatgtagttgagcggttttgagtgagattcttaattctgagttctagtttgattgcactgtggtctgagagatagtttgttataatctctgttcttttacatttgctgaggagagctttacttccaagtatgtggtcaattttggaataggtgtggtgtggtgctgaaaaaaatgtatattctgttgatttggcgtggagacttctgtagatgtctattaggtccgcttggtgcagagctgagttcaattcctgggtatccttgttgactttctgtctcgttgatctgtctaatgttgacagtggggtgttaaagtctcccattattaatgtgtgggagtctaagtctctttgtaggtcactcaggacttgctttatgaatctgggtgctcctgtattgggtgcatatatatttaggatagttagctcttcttgtttaattgatccctttaccattatgtaatggccttctttgtctcttttgatctttgttggtttaaagtctgttttatcagaggctaggattgcaacccctgcctttttttgttttccatggcttggtagatcttcctccatccttttattttgagcctatgtgtgtctctgcacgtgagatgggtttcctgaatacagcacactgatgggtcttgactctttatccaatttgccagtctgtgtcttttaattggagcatttagtccatttacatttaaagttaatattgttatgtgtgaatttgatcctgtcattatgatgttagctcgttattttgctcgttagttgatgcagtttcttcctagtctcgatggtctttacattttggcatgattttgcagcagctggtaccggttgttcctttccatgtttagcgcttccttcaggagctcttttagggcaggcctggtggtgacaaaatctctcagcatttgcttgtctgtaaagtattttatttctccttcacttatgaagcttagtttggctggatatgaaattctgggttgaaaattcttttctttaagaatgttgaatattggcccccactctcttctggcttgtagggtttctgctgagagatccgctgatagtctgataggcttccctttgagggtaacccgacctttctctctggctgcccttaacattttttccttcatttcaactttggtgaatctgacaattgtgtgtcttggagttgctcttctcgaggagtatctttgtggcgttctctgtatttcctgaatctgaacgttggcctgccttgctagattggggaagttctcctggataatatcctgcagagtgttttccaacttggttccattctccccatcactttcaggtacaccaatcagacggagatttggtcttttcacatagtcccatatttcttggaggctttgctcatttctttttattcttttttctctaaacttcccttctcgcttcatttcattcatttcatcttccatcactgataccctttcttccagttgatcgcatcggctcctgaggcttctgcattcttcatgtagttctcgagccttggttttcagctccatcagctcctttaagcacttctctgtattggttattctagttatacattcttctaaatttttttcaaagttttcaacttctttgcctttggtttgaatgtcctcccgtagctcagagtaatttgatcgtctgaagccttcttctctcagctcgtcaaagtcattctccatccagctttgttccgttgctggtgaggaactgcgttcctttggaggaggagaggcgctctgcgttttagagtttcccgtttttctgttctgttttttccccatctttgtggttttatctacttttggtctttgatgatggtgatgtacagatgggtttttggtgtggatgtcctttctgtttgttagttttccttctaacagacaggaccctcagctacaggtcagttggaataccctgccgtgtgaggtgtcagtgtgcccctgctggggggtgcctcccagttaggctgctcgggggtcaggggtcagggacccacttgaggaggcagtctgcccgttctcagatctccagctgcgtgctgggagaaccactgctctcttcaaagctctcagacagggacatttaagtctgcagaggttactgctgtctttttgtttgtctgtgccctgcccccagaggtggagcctacagaggcaggcaggcctccttgagctgtggtgggctccacccagttcgcgcttcccggctgctttgtttacctaagcaagcctgggcaatggcgggcgcccctcccccagcctcgctgccgccttgcagtttgatctcagactgctgtgctagcaaccagcgagactccgtgggcgtaggaccctccgagccaggtaagggatgtaatctcctggtgcgccgttttttaagcccgttggaaaagcgcagtattcgggtgggagtgacccgattttccaggtgccgtctgtcacccctttctttgactcagaaagggaactccctgaccccttgcgcttcccaagtgaggcaatgcctcgccctgcttcagctcgcgcacggtgcgcgcacccactgacctgcgcccactgtctggcactccctagtgagatgaacccggtacctcagatggaaatgcagaaatcacccgtcttctgcgtcgctcacgctgggagctgtagaccggagctgttcctattcggccatcttggctcctccccctgtctatacaaaatataaggagcaaaagaagactgttaagaggctaaaaataacctaaacatgccaaagaagtagagagaaaattgagggtgtttttaacatttattttaagttcaggggtatatgcgcaggtttgttacataggtaaacttgtgtcatgggggtttgttaatacagatgatttcatctccgaggtattaagcctagtacccattagttatttttcttgatcctctttctcctcccaccctgcaccctctgataggtcccagtgtgtgttgtttccctctatgtgtctatgtgttctcattatttagctcccacttataagtgagaacgtgtgagttggtttttaatttatttccctgacttgtgatacccattgtgaaaatgtatattatgggtttaaaaataataatggtaataacagaaatgttaaaagctaacatttcttgagcactttctatgtgctaatttgtactgatcactgactgagcccttgtgtagatgaggaagtggaagagttgagtgactgcccccactagcatggctgtgatgtgcaaagccaggactcacccaggttattcattcctaaactagaacacctctgagcaagttttctttgcacttgagtaaagcagatggattaatgtttgctagaaagctaccagacattgatagagagccaagtttgcaatggaaaatttgtctaaacctgctagtgttaactggtatgatctccccttgttttgagaccaggcttgttctggaagtgttgcggctgttttcttctacagctctatcaatcccttcctctttccctcccttgcagcaccaacaccttcaccatcatcacccttttatctcttaggtcttgatggcttccacattttaggatatctgatggtcctccaatgtcacttaatgtattttccattgggcagcatcttctctagcctcagataagaattaaagttctctcatgagactagtttgaaaagctgaacctatgagacaaagtataattttccaatacccataatgatggatattctaaataaagaagagtatatgacaccaacaccaagttttttttttaatcaaaagcaaggttgactcttggtattcctagaatagaggcttttataacagaccttaaactgccttaatttaaagcaggtgtataaaatacaaaatggtatttaaagaggtgtagagatattaattaaaataggcttgctgaaatgccagggatatcatcacttctgaaaattgaattaagccctgaatgtcaatggtgaattaacatgaatagacttatctatccctgtccaaatatattttatccacaagctgtgtaatacacgatgattaaccagaggttacagattctagctgaaacccaatcaaattcttcagaatcctaattgaggaatgcattcaggtcaaagaatattaacagaaaagcctctgtcatttaaagggcaagcagagtgagtgcttaaaagtgttcaaaattttgcttaattgttctcttcttgagctattgttcttgatgatttagaaaacctgtgtgctgcaagtttaactgctttaattacagtgatgtcaaatacataggcctttctatttaaagggattttaatttctgtggcttatgaaagagaaactgaaagcatagttaaaagtgaatatgttagttgagaaagttcctgttcttaccaagcaataaaattttcctaaatggatgtttgaaggagagctggtgttcagaggtgtggttcagttgaagctcctctggtagaagcccagcattttgtctgtctagtttttttgtccttagcattgcttacttttgtaaagccccagatatatataactcattgttaaagtatcacatggtttgtacagcaggatgatttgcattatatgaaggacaccgaaacacagaaaatgaaaggtctacggtgtatgacaaacaggacaaatgctctagcaaaaataaattctactttctctcaaaattagcatacttgttatttaaagaaatgtgccagaagagaaatacaagattttcttttcttttttctcattgactttaactctctctgaatggcacctataactaaaaatacatctcgggaatcaagtaaccctcttttatatacatccctctaaatctatggctaagttcaatgtttaaggttgtcaaagtggctcccatccaaaatcgggttaacatttgcactttgcctaaagtgggactcctagataaaattcaaacgacctttctggtaatcccagcgtgtgggttttagcatcaccagctggctccaaatgggccactgctctctctacaaagaggagggagccttcaacacaggggccatgcttgtccattcaactgtgtctaaattcacagatcagtgtttctctcagtccctagaccagcaacatcagcatcccttgggaacttgttagaaatgcagagtctcaggccttgcctcaccgaatcagcacctctggggttggacctagcaatgtgtgttttaacaaatcctccaggtaattctgatgcacacctaagtttgagaaccacttttgtaaatgtgtgtttcaacttgacactaaccaataattctaccacttaacattaacagctttcaattttatgatcctttgtgttggacaggtcaaagtgggtgatttcaactgcttaatgggtacagaattttattttggggtgttaataatattttggaactagatagaggtggtggttgcacaaccttgtgaatgtactaaatgccactggattcttcactttaacaatgagtactattggccgggtgtggtggctcacgcctgtgatcccagcactttggaaggctgaggtaggtgtatcacatgaggccaggagtttgagatcaacctggccaacatggcgaaactctgtctctattgaaaacacaaaaattagctaggtatggtggcatgtgcctgtaatcctagctacttgggtggctgaggcatgagaatcccctgaacccgggaagtggaggttgcagtgagccaagatcataccactgcactccagcctgagtaacagagtgaggccctgtctcaaaaaaaaaaaaaaaaaaaaaaaaaaggttactttgatattttatgttatgtaaatttcaccttgtttttaaaaatatgtaatataaatgaaactcaagtgttttagatatgccagtctaaagaaatctgcaaattaaacaatttccaattcttaatcattcttattttgagtacatcctaattctttttttacacatatgatatgatgcattctaattatacaattactaaggtttcccaagtaaacatataaaacagagtatctgtaaagctgtgatttgagtgcttttcatggaaagtttctcattagaatttcttgatcagccaaacaacagttttcaactacaagcaaaacaagggaaagcattatttggttgtctgtcattgctagggtgaagactataaaagaggcaggaagagtaaaaaccaggcttttaaaattaaatttcaggcaatatcttatagtacctccaccctcatgttgggcaattcaagaggtctattcacattgcattgtatgaatagaattttatttcttttgaaatgtaatatagaatattttattttataatatgatctgaggatgcctcctggaattgtgcaacacaaaggtcttgggtgttgtcctttctgggtagagggtttgttagctactgaatatatttgttataaatatcactggggatttttttaagtaaatttattttttaaaaaaccctaatcctatgaagtttcactaaatgtaaaaaacataaatcaattaaggcttgaagtaacattttattttactgtataaccctgtaatcccacacacacacatctattatagacataatacattactatatagaatactggaaaatatcgtaaaatacattaaaaaaacaatttcccttactctcagaactgagaagtaaaatctgttgtatcttgtgagagtatatatgtatgtgtgaacacatatcacacatatatagagtacagttaataacaaacagcatattccattttaaaacctattttcccttaccatatcagattttttttcttaacgagaaatattcttctacaatatcaatatcatttgaaggccatatagtatttccacttatagacgtagttcacttgattaattttgaattccccttaattgaacacacttaatacttcatttttctttaaaatataacaaccttacccctatattttgtgcttttgctgattacttgtcaaatatatttatttgtggtatctctttttatactagaaacatcaacctctttgtcaaattgttcttccagtttattgtatttttgttaattttgattttaacatgtattttatgtttggtgttttcttttttttttttttttttaaagaaaaaagctctcattcttttttaaaaaatagattcagggtatatgtgcagatttgttacatggacaagtttcataatgctgaggtttaggcttctagtgtacccaccacccaaaaagtgaatatcatatccaataggtaatttttcaacgttcactctcctctcatcctccccacatgaggagtccccagtgtctattattgtcatctttctgtccatgtgtacccatggtttagctctcgcttgtaagtgagaacatgtggtatatgattttctgtttctgagttatttcttttaggataatggcctccagcttcatccatttcatccattttactgcacaagacatgatttcattcttttcatggctgtgtagtattccacagtgcacatatagtacattttctttattcagttatccattgatgggcacttggcttgattccatgactttgctattgtaaacattttatgttcagtgttctctttcatagtgttgccttcctattccaatattatgtacaaattttcctatagtttcatcatcatggttttgttgtttacatttaacgctttatttgaacatcaatgtgatctgtgagatagtaaaaagacctaagtcaatttttccaaacagttaaaacatgtttttatcatttattaaataacacagtactttctccatggatttgcaaaataagattatccaaccaggagcataaacagagcaagttatttaacctctctgtgccttcatttcctcctctaaaagaagaaagccagtaacagcatctccctcaaaaaactgataaaaaaaaatccacaaggtgcctgacacggaataaacttcatcaatattatatgacaaccactagtatgattacaattattattagtgccctaatgctaccactagtatgattacaattattattagtgccctatctacccaactcaatatgctagtgtcttttttaggatatttacaattatatttgtaagtgagatggcctatgttgtctgtgcttacatcaattctgtcaggctttgaatgagggacttgatggcttcataaaattaaaaagttctgcatctgtttattttattactaaatgtagaatttatccttgttgtgatagattgacagaatttctctcaaacctttatgagccctaaacatttctttaaaacaacacttggaaaagtatttcaaggtctttcttaatttttgatctgttgttaaaaatttccctttcttttggatcagttttggtaattgctacaattctagaatgaattgttggggagcatgcctaaaagtagacaccaataagggagttgctctaacagtttaggcaggagatggttcccaattctaaatccatagctttccctaatatcgggcttgataaataacaacacagtaccccccatttataatgccaaaaccagggaattctcctgaatttctttctttcccttagcaccatttaccacagtcccacatcccattcctcagccaggcctgttgcctccatatccaaattacatccaacgcatccacttctctccatctccatagacctcacattagtccaacctccatgaaatagactcagttgaaatagcatcttaattggcttcctgcctccagttttgcacattggcagacaaagtgatcttccaaaaatataaattaaatcatttcactcccctgcattaaacctaatggacttcttttgtgtttcaaatagaaatctaaactccatccctctaagagcccttgtgacttggattagaatttgccctttgccccaaccacctcatcacagatcactgtgccgctctcttgctatgttccagcctctctggactctgtgttcctggagcaagccaatccgttcccaccccaaggtatcagcacctcctggaactttcttctcttctccagactttggtgtagcccctttttcttttatctaatgttcctaccccaatccactcattattttaccttaccccattttattttcatcattgacttcttctctgaaatgttcttgttcattacagttgtgtgtttattgctcttctacctgtaagcattatatgcattatttacatgtgcctgacacatgttttgccttcattaaatatgtattgcatgaatgagtgagtgaatgaatggatatagtcagaatgattttaaaaatgaatagactgaggaatttaagaattagaatttttaaaagttagatataaaaatgatcccccaaactgatatgaggtaatgcttatgttaaatagcttgatttagccattccacagtgaatacatgtatcaagacatcatgttgtacaccatatatatatacaatttttactcgtccaacaatttttttaatgactagaatatacagggagctgggagtgtgtgctctatctctatgtacttgggtgtgattacaggatgtgtaaaatgtagagatcatcaagttgtgtacttaaaattaatgcattctgtgctctttaatgcatgcatgttatttctttaaaaaataaaaccataaatacatgtttaaaatagccagagagagcacaaaatttaaataatatgtgtaacttaaaagcttccatttttacatagtctaggacctaatatcacaggcaaatttaaaatttctttgaaaatgagctttgggattctgtaaagatttggggctctaccatgtggttgataaacaaaattactctctttactcaaggacctaaatggactttaaaatgagctggaaatcaactctggcttcaaggaaaagggtatacccacagggcaaacttgttttgcctcaaaacatactttatcatgtaacgtcccattcctcacccaaattagatagccttacattatcatgtgacatctgttaaataactcaaataagaaaatagttcctgatatttagataaggatacttagatttatagggtattttcctgcataagacactaatgacttttataaaatgtttcataaatgtgttttgtgaaaacacaaatatgagtcagctggcatagcaacatgcacagtgtagcaactcaaacattttctgaataaataaatgaaggaatgaggataagaaataaaaatattagaggtaattatttgggttccagatagagctttattttaattatagtttcttaaatttgaatgaattcactattttaccataatcagaagactgcagcaatcatcaattgcacaacagtgatggcctctgtaatttggcactattagctcctgaaatgtattgagatgtataaatataagcatcttaatcttttcaatataccctagcaaactggccctagcatccctagggctttcggagctaaggggaagttaaatgcccttctcttattccctgccaaaataagaaaaactttattgatttgaaagtgttaatttcctccaacttttcatatatgcagtaggcatgtcaacagagcaaaaatagtcttagctattggaaatgaggctacagattttattaggttggtgcaaaagtaattgcggtttttgtcattactttcaatggcagaagctgcaattacttttacatcaacctaatagattgacttatgtcataactatacatttcccaaaaatacaagacatggttcaaacattaatatttgtgacttagagcatcagaatgaggagattaaaagtttgaaaatgctccagcacttggatgaggcaagaatagtgaggtacagtttaagagagttaagaattaaaagtctttatgccaagctaaatgtgtccttcaaaagctgtgcatgttatgactgctggctccaacgcatctatctagtcagtctctgctattttaaccatcttttttctcttcaatttaccacctattattaggccaagaaaacttgagcatctgtcaagagtaaaaatattttgaagttttcttcaaacacactgaattccatgatttacacatggttctttttttaagagatgggagtcgtgctgtgtcaaccaggcttaagtgcagtggtgcgatcatagttcactgaaatctcaatctcctgggctcaagcaatcctcctgcctcggcccactatgtaggtggtcagccacctacaggtgtcagccaccatggccagcttcatacatgtgttctgaagcaacttttttgaaagcatggtatacacatcacaaagggtgcacaggtactttagggtgaatatctgtatttgcacaccaataaattaacccttctaatgtaaacaattcagtggtttttagtatatttagtatattcatagatgtaaaatgagcatcagtatataattttggaatgttttcatcactccaaaaagaaaccccctacccattaataagcattcttccctccttcctcttcccagaccctggtaaccatttacctttctgtctctatgtgtttaactattctagaaatttcatataaatggaatcatataaaattatgttggtgcaaaagtaattgatgtttttgcttgtgaaagtaatggccaaaactgcaatcacttttgcaccaacctaatacctggtatgtagtgactggcttctttcacttagcataatgttttcaaggttaatccatgttgtagcatataacagtacttcattgctgttaattgtcaaatattactcaattgcatgtatataccatatttgattttccattcatcagttgatagacatttggattgtttttattttttggctattatgaaaaatgctgctatgaactttcaggtataagcttttgtgtggacatgttttcatttctcgtaggtatatacctaagaatgtaattgctgggtcatatgatggctgtgtttaacatcttaaggagttgcaaactgttttccaaattggctatgacattttaccttcccaccagcagtttatttgataaattcctttcagatagaattcataaatattttctcccattctctttgttgtctttttaccttcttgatagtgtcctttgtagcacgaagtttttgttttttataaagttcaatttatctatattttattttgttacttgtcctcttggttatgtaagaaaccattgcctaacccaagatctcaatgacttatacctaggttttcttctaagatctttagagttttagctcttacatttaggtctatgataaatttcaagttgatttttgcatatagtgtgaggtaagggtccaagctcattatgataatgatgagaagttttattttaaataaacatattttaatgtatgaaatttgctaatttaaagaaaaatcttaaataaatggtaaactataaatatctaagaaatgtatctcttttcaggttttctaggaaaatcaacctaggatttatattagtaaggaaatttatacttaaaattttacttttatttattttactttttatttatagaaggtaaggatgaaatgatgaagtgggatagaggttgacacctatatatgtgccaagctctttgtgaatgtaaaattctattttaaggaaaaaaatattgtgttttgaaggctaagaaaacatgtatacaagaaactaaaatggtgccattgggcaccatcttctttaattcttagttttaaaattcagggaaatactttggttttgataagcttaagcctaagtgttgaaaaattcttaagtaaggtttaaaattaaaacgacatcagtaattgttaataaagggatcaccaaaaaaggcttcactatagtcagttcattcacatcaagttacctagtcagtctgggttgattaccttaaaatgtaagaagcctgtattatgactttattttaataataaaaaggtcctttcagttctaaaaacatggctatatcatgttttttacttcttgagcctataaaaacaatttctttataaggactaggataaccaggaggcctagtaatatcaactaaaaaacattttattgatgaaatagtttacagagttttattgaccgtgcaggaaacattcagggactcttcaatcaattctcttagtatttccagtggtagtttgagaacattcccttggcactgtttctatatctgcaaacttttaagagacgtattagctgggcatggtggttcatgcctgcagtcctagctactcgggaggctgaggcaggaagattgcttgagcccgggggatagagtctacagtgagctgtgatggtgccactgtactccagcttggatgatggagggagattctgtctctaaaaggataaataaaacaaactagagatatattcacctcaagttttctctgttgaaaaaccaactagcttttaaggaagtttgtaacttccttaaaaacagttagttggcctttctctgtgctccaaaagcatttatccctttgtcctaaaaggatctacgtattttcctcttctaccagatcattagaagcttgagggcaaagactgtgccacattcataaacataaccctggtatagaaaatggcaataaaggcataaagtttgttgaatgaataaaaaacacaaatgaaaaagtatgtttatggtattggtagagctcctggaacattcatttgcatataggtgaatcaattattgtaggagaggtcgcttcagtaaatgttcagagttttcctgggattctatgacataaagatccacaagtcagctttgaagaaggcagctctcaagccctcatctttgccgtccattggatggaggaagggtggcatagcaacaatggttgtttcactgcttaacccaactccctgtagtaaaattccagaggtttcaccaggaagtccaactacactctggtttacatattccatagggattaaatgtcctgtgctccataggtgcattggattatcgcgcatccactaaaccccatagatctgtagattaccttagacctttctgccccagttactgattgagccacatgtatcaggttgtttaggtttccatagcctcccctgtgctcttgagagcttaaagccccttccctagcagagcttcattacacaaaaatggaactaccaacctaattaatgacacagccatacttctttctataagaaggacattttctgaagtcaaatactctacccctgagctgtacccgcaagaaggacattttctgagacaatctgaagaaagtcaccatctgttaatgacttttcaggaagaatttggggttctaactagataaccacatttcagtgttacccttagacatggcccagcttaacacatgagtgagcagagacagatctggatgtgagatgtgtgggtgggtacaagcccattctgtttgctttatttttaatgataaagcagtagagcttggaactgtggatattggctctattgcatacatgaaatgtgtaaatgctcgtctctttatttatttaaaagaaaaaataatatgttgaaaggcaccacaagaagtgcccaatactgtccaataccatgctgaattcataatttcttctatgtataaggaattgtgtgccacacacttagcctaaacagcaatcatataaaatgacatcaatgaccacaactatcaattatgatatttttattcaagtgctcaggtattagagcataacaattgcagagccatttcagggttttctgggggtgatgagtttaacaatggacaacatttgggtactgaacttcagggacattagccgtgtctgttagcaactctgcaagttgcttttgctgtatttgaacttacaaggtacaaaatatacctcacaaggggaaattcagaagacagtctaataggtggctcccttctgtgctaatatgtgactttcaatccatgtcataagattcttataaaaggtttagcatttgtaagtcctcatgtatagattgaaaagaaactatcagcacaaattcccactgaaaagaaaacttgattcttagttgttttgaaaaatgattttatttttatatttttctcaatattatagtaaggaaatgagttcatggtcttgtaagcatttataaagtatataaaatgatgaagagaaaataaattcctgtaaattgaatatttttataatctcaaggtaaggaaagcttttttatacatggcaataaatcagaaaaattacagtgaaaatattgatagaaccaaatataaaaaaattaaatttctataggagaaaatgccacatcatttgacattaaaccaaatgatacatttgaaaaaaatattacaacatatatatcaggcaaagggtcaataaacacttaagcagcccaaaaaaaggttgtttataaatcaataagaaaataaatcctacttgaatagggggattatagccttaacaaactctttctactctaaaagacatgtgaatggccaataaataagaagatatatttccaataactagtcattttaaaacacaaataaaaacagtaacaagatattctattatttttcagcagactatcaaagataaaaaaaaattgtcaataacccatgttggtgatctcacatgctgtaggtacgataagttgaaatatcaatacctttggccctgcaattacacaccaggaatttatcctaagtaaattatcattcaagtattcaattatatatatatatacacacacatatacacatacacacacacagatgctcattgaagcattgtttataataataaaacctgtccaatgatgagaaatatgttaaataaattatggtgcatctatatagtagaatactacagaaccaaattaagagggaaatatatttctatatttataaatattttatcagtatatcagtaagcagtcaagttacaaataaatatgtttactttgattctagttatgtaaaattctgtgtgtgtgtgtgtgtgtgtgtgtgtgtgtgtgtgtgtgtgtttatgtagagaaatgtctacaactgcaccattcaacttggtagacactggcctcatgttgctacttaaatctgaattaatttaatttcaaccaaattaaaaattgtgttagccacatttcaagtattcaatagccatgtgtatctagtggctaccatattggacagctcagatttggaatagtcccagcatcaccaaaaatttctgttgacagcactggtctggaaagatgttctccaccatgtttttaatggttgcttctggctagtgggatctggagttaatttcatttaattttctaaattgcttgaactttttatgagcatgcaattaattcatattcagaaggttctgtcatctggaaaaaactcacctatgattccaccatgtagaaataagcattgttaatattatgttgtatttccttgcagtctttgttctaaatgctcatagttgcacagaatgacaatatgtacatgtttttaatgttgtatttatatctaatacaccataagcattgtatcttattctttaaagctcttcataaacattactttaaaaagctgcatactgttctgtctaatgtccttaaatgatttttgttatatatgttgccttgaatgtactaaaatatttaagaattttgcaaatcagttgggtttgggaaaatcaaatttatagggaagacagtgatttatagttcttttgttatatgtagaggaccatctaatacatcacgctttggagatgctttttttgttccaaatcactattcaaaaccaccttcacaaaacataatagctttagaaatcaatgtttttgataaagtgcctttattttcaagtatccactttccctactgaatgcaacaatgcacagacatctttgttattatccaccttctgagatttatccaaaatgtgtcacctctctttgaatccctttagaaaccattctttgatgaacatactttatttggctctcctggacaacattttgataaatataaaatgactttaacacaagaatcaaagggaaaaaaatttcagaattaaagaacaatgacctgaaatccatggaagaggagcacgtgtaacaaatttacttgacatcttgctctgcaagttgcttttgctgtatttgaacttctctccggaataaaactgaaatcaggggctttgtgttctataccataccctggtacataaaacctttccaattacatttatgttctcctaggagggatggccccaaaggcacctcagactttgcatatcaaaaaccaaactcataatcataatcataccctgtactcctccccaacagggtccttctccagatctccctgcctctcttgactacaactcctttctctcagttacgcagttcagaaaccgagggttgttactgacacctccatttcttcaaccccaaaactgaatccaacatcaagtcaagctgattttgcctcttacatatctctccaaatctgtcccccatattctagcaagtcacattccatccttcccccgtttaaagccatttggtggcttccccttgcttgagggcttagaatgccttgacaagaacaaaccttacttccttgcagaatctggctccttacctatacagcttcatttcacccaaccttctctactagcttttaattttctcatccttgctgctcttcctcctaccacaagaaatttgcataacatgctactccactgcctgaagtgcttcttactaaaccctccttcatctaagactcttctccatctttcaaatttcaactcatcatatgcttgtttagggaagccctctctgatttcattaattatgttagactcacctactaaactcttttgcacacattaatgaggctgtttgattaatttaatgcccgtttccttgccagaatgtaagcaccaccagggtgtaagcatctgtttttgttcactgatgtagctccattaactagcacagtgccagataaatagtaggtgctcaataaatatttgtttactggatgaataaagaccatgagacagatgcccccaagcacaaggaaaatgctgagtcttctacaaaagaatcttggagcactggtcaacagcagagcctctctaaagaaacagattcccccatgaggagaaagctgcataagtcatcaaactttatagtgaaatatcctaattacatttccctttgagttggactgtactgtatgtactgcactcagtattccccaagaatagtttgtatctgagatatagagcccaggaggctaggcccaacaggactattcttggggaatactcagagtggattctatttatgtatcccagagaaggcctaaggagagagatcttgaaagcattcatgatgcaatctcctgctgggaagaagaaagccagatgggagctaaaaattgatgccaataagagatttggagcaatgctgttcaaactgaggccttttcctgtttcccaggagcatagagtcatccttctactaagttttaagacttacagaccacctgtaaatgtaactggcagtgtgctgaagccagcttgtaccagttcatgagagccaattgttaaatgtttgctaaatttgctacagattgatacacacagccattatgataaattaaataatttaaacttaaagctaaataaattatactaaaaatgcaggtaatgaatactcaaaactcatcactttctaattattttattaaatgttatgattaagtatgattttgaggctatttatagtcttgtagctctatggtgaaattgtgtgctacttgatctttttttcaattctgaattcagtgagatcatcagggtggcttgaaattggctatgttgggagtatttacaccatggaaaacagtaaatgctaacattcggggatttggaggcttttgttgttgttgttttgggttttttggttttgttatttattgtttgttttgatttgttaaaagcctgttgttgaacatttaccggcataccacaagaggcaaccaattcatggcccaatgtaatctgtctttttgtacttcattgttgaaattacctagcaatactaggaaatcttaggtcgaagtggaattgtgaatcttccaatcgtctaaaccacatttcttctaaactacatttcacaaaaacatattgggtgggactcgtttgagaaaaaaaggttatatatatatctttttaatcccatatcatatactgctattttttaagtacctaagatagtgtttggtataaattaaccatatagaaaatatttgaataaattaattataggagtcaagaagtataataatttgagttaattcttgacaataggatgatttgaattctcttcatataaaatgggtggcattataattcatttcaaaatatttcatgcattaaatatcttcttaggaagatgcaagaacacttgacttcccagttttcaaaggattttaaaaatcctctgggaaaatattggttggggagagaaatgatggctgtgaagagggagatgaagagaaaaatgtgaaaaaagtgaacgagatttgagaacaaaaggaaaaaataattgcctaaaaattaatcagtgcaggccaacaactaaaagaagtgactaatgtcctgggaatatttactgcttttttgtaaaatttttttaaaattaagagagctttacactccttaaatttcctttctattccctatttagaattgtactggctgggtgcagtgtgtcacacctgtaatcccaacaccttaggcaggcagaggtgggaagatagcttgagcccagtggttcaagccctgcctgagcaacacagtgagaccccattttccacaaaaaggaaaaaaaaaaagttagaattgcactaacaattctggtgatagcttttacaatcatataacataactaacaatagacacaatcacataactcacaagacaatttttttcttattgaaaattgaggtcttagagatgacaactttggtcttcatgtataatgtgttttgatggatcaatagtaaggcattttagaagacattttcttactttcacctcaaaagaagcacacacacacacacaaaggcatattgaagacggggcttatttaaatgcaactagttattccttataaaagtagacatcaaaccttatcaaggctttgaattgttaagatctttatatccctgtgtttctgatggtatattattgatttttatgtattatagaatatagttaacccatgtgtatctagagtaacacaaaaggtatataaataaaacaaaggaaataaatctgaaaatcaaatagtatttactcttagaatatttttataactttcagcaaatacgtattcacatctatatttagctttatagataaattacccatttacttcaaactccttcagttacctgtagtgaactggtgggaaattttctcgctccttttaactcctacaatcatttataattttaagaagaaaaagaggccgggtgcggtggctcatgcctgggaagctgaggcagatggatcatgaggtcaggagtttgagaccagcctgaccaacatggtgaaaccccgtctctactaaaaatacaaaaattagccgggcgtggtggcatgtgcctgtaatcccagctactcaggaggctgaggcaggagaattgcttgaatccgggaggcggaggttgcagtgagccaagattgcaccacggcactccagcctgggcgacagagcaagactctgtctaaaaagaaaaaaaaaaagaaaaaaagaaaaagataagtataagctaacatttatttcactgcattttttcatagcattcttaaaataagtaatcatgtcagactccacaaaaatgtattaattctttatgtacatgtgatacattagagtttgaggatttaattttgatcaccacactaatgatataaggtgaacagacattgctattatcattgttaaagctttgagaatatgagttgcctaatttacaaagctagttaaatggaagaaccaggaactgaaaagatctagaaatgacttgtcctttagcactctttaaattaagcttcccatggaaaaatgaattaagggaaaaacaaaattaaagtgcaaatgtttagaatataggtagtcaagtatacacaaaccatgaatatattcctaaatgtgcacacaaatatacatactgatcgacaaatctcaaagtaagtaaatggatatacatacatatactaaaatgttcttgtctctataagagattaaagtattcagtatgttccccccatattgtgtttcattttcatttgtagaacttttcagtgtctggttcttccatttaactagctttgaaaattaggcaacttgtattccctgagcttcaacttagttttccctcaaggtggatgataatagcaatgcctggtcaccttacagcattagtgtggtgatcaaaatcaaatctgcaaactctaatgtgtcacatgtacataaagaattaatatatttttgtggtgactgacatgattgattacttattttaagtatactaccagctattaattttttttcaagtactcacaacttgttatgtgcggctctcagcccttaacatataatgattcatttatttcccataataacctttttaaggggacactactattatcctcatcccacagtttggaaaactgaggcacagaatgattaacaaaattttttaagttcacatttcttcaaacgacagagccggaactcaaagccagacagaatgcaggctgtctggctgggcacggtggctcacacttgcaatcctagcattctgggaggcagagatggacagatcacttgaggccaggagtttgagaccagcctggccaacatagcaaaaactcaactctactaaaaatacaaaaattagccaggtctggtggtgtgcacctgtggtcccagctatttgggggctgaggcctaagaatcgcatgagcccaggaggtagaggctgcagtgaactcagattgcaccactgcactccagcctgggtgacagagaaactctgtcccctgcccccaccaaaaaaaaaaaaaaaaaaaaaagaaaagaaaagaaacagaatacaggctgtctgctgttttcctccatgtgtcaaaagctcacagcatagatgatggattttcttaacaaagggaacatcgtgtttgtcattattaataaattgtcatcctccttttttgatatgtttgattttaaattatgctctgaggttttagaagcccctttgacacatctaactatagcacagtaccatggaaggaagtagatatcattacaaaataggaaaacttaaatctcaccaataaagaactcatcaactagggagatgctgcggactcattgtaaaagtgtctgtgcattctattaacaaacaggcgtcattatgatagctagaagcattgaccttggatgaaagttgaggggaatataatgcttttcatgctttgtcgggggtttaaacaggaaggcacataggatcctaattgtctgctttgcacacaccattacccctcagggcatgtggattttttatgcattgcagtggtaagggctgtgcatacaaattttgctggcagacaggtggtagcatatgtcaaaaagactggggggatagtttaaaacatggctgaaaagttgtctatactttagaatttttaagtttgacaaatactgactcaatgaggaggaaaaagctaactactttttccattgactagttttcaaattgctatagttcatgcacttttattttcagcaaggatgattgtacaaataatgattaaaattgaccatttagcttcgactctttgctaggaaggcaagcacttccatgagaccacctttctttcctattttgatttctcatatgcattattttatatttttaacaaactgcctaaaatatcgctaaacaaggtaacttgaatgagtgctatttaagttttattctgccaattgaactatttgcactattttatataaactgcatcaaattggatatactttgtaacacggtgtgatatggagagggcttagagtttaccatcaggtgtacttggattcaaatctccctttacaccattttataaaactgagcaaattacttcatctttcagcacctcatgtgaaattggaataacaatagctatttctctgtgttagtttgcagattaaataggtggaagaagatacagaacagctggtgtggtagttgacacagtcactaattagaagaacttgttgttatatgtatcatttttatagagaactgaacagagtcagcactttgggaggccgaggcaggcggatcacgaggtcaagagatggagaccaccctagccaacatggtgaaaccgtctctactcaaaatacaaatttagggggtggttggtggcgcgtgcctgtagtcccagctactcgggaggctgaggcaggagaatcgcttgaaccagggaggaagaggttgcagtgagccaagatcacgccactgcattccagcctggtgacagagcaagactctgcctcaggaaaaaaaaaaaaaaagaatcttagtagcctatctgatgaaattctttcaattatagatcccatagaatacatgaagattaatcaatattgagataacatttccttatttcctataatcacttctttaatgttgtaacaggtgtattcaatccattgatattctattggctcactcacagaggttacctaaagagagttcccatatagtcctaagaatgttttccggctatggaaatgcaagagagcacaccaggaatgactgtccaccagtgatggatgagactgaacagataaatgctgcagtttccaggctacttagggacatcctaagatgtgttcttcattctgtctccaaatggcactagtgttttgagcctcagttgcccaaaatggtaaaccgctaaattaacacagtctttaaagaccttcttccctccttgtcttacttccccactcctcactgtgctttctgcaatcatctccaaaataaattacttgtcctcagatctttgattgggtcagcttctggggcatccagacaaagatcctgtctgccaagcatgtgtattgcaacctgggaaactattagattggtgcaaaagtaattggggttttgccattacttttgcaccaacctaatagctcaggcaatgcaactttttgaaataggtaatagcagcattttcccagctctgaagctgtctctccacattctgagcccaattttcttggtccaaggactgtggatactttatttcaatcccattttctgcttcttctatggtcagcctgcctgaatgccctccagcagccccttatctttccttccttcctagctctcgaaactgcattaaaccagaccctgagcttgttcctggagatgaggaaaatctaggatgctatttagggatgctcctttaactttatttatctcttctctctgactgcttccaagaacaaccaaacttttagctccatgggaactccagggaacttttagcttctctgtttgtgaaccaggagaatattatctggatgatcgccttcgtgtttcttctaatttttttttgttttagacttaaatagtgtgttcactttagctcaatcaattcaagcctgacagcttcaaaccgctttatttcagatgaagatgcatggctaagctaattatattttctcttcttcatcaacagttttctatacttatacagtgactttataaattcatcattattccatcccaaaacaaatatgaatactcttgttatggtaatgccactgcgggatatgaaagggcagtcctctaccagctcgtttttttcctagtatgtacccatagttgcttttctttgacatagtcagtctgttctccttctactccctctagttaaaaaaaaatagctaaaaaatatttaaagattttccatctgttacttgtgggaaagaaatacttaaacaagtaacatcctccgagtcttttgctctatttagaagaatattcacagcaccatatttcagagccatcattgatgcaagtggataggtgtttcctctataaaggcttgctggctgtgtgagccgcctaagccactggtacaccctggtgaacagaatgatagccttcatcacactcatatataaaagaaagaaaccttgaaaatgagaggtatgaggataagcattgattcaaggggaatttgttagtctgtgttttattttctgagatgcaaatgttgaattcaagggtttgatgggaaaccagcctggacgtaaatttatacatttcctccacaatgaaatttgaataaagcatagcaagtcggctctgccttcaaagaaaaggtagctttatcactatgaagctgaatcacacgaatctcacttaagtataaggaatccatctctttcatttccaactgttgtactgagtgctactggaaagcctcttatatgcttgatgattgataggaatggatttgagttccatccatataactgtaattcagattgagaatattgcattaagtgcagggaatcaaattaacctacacaaatcattggataagcctacaatccaataaagatacatttcatgagtatgaaaaaatgagtaaggtatatcttctgcacgaaaaatgtttctggtatcaaaaataaaatctaaaggtcatgaagagatgttttattttgtagatacttggcatgcaaataaaataacctttttaaaaagtggtattaaaaagtaaggattcaaaccagcatttaactctttttttaaatcatcctttagcctgtgtttattccttccattaattttgaatattttaaatgatataatgcagtaacacatgctgtaattgagtccttgcttcttaggtgtagaacagtctttactttcttcagtggccaattacctgaaaatgggaatcattaacatgagctttaacaagagcaaaactcaactttctttgcaacagacatgaagtaatttaatcacaaatcctgatgattgagagaaaatgaatttacttagtcagacagtctttatttggtagcacttatgggaacagaaatgatctagatttaactttaaaagtggaattcaattatagctgccaggattctgagttggtctggttaatttcagctgtggagatacatctaggatattctgcaggtatttacctacttgagtaggtaaatccttctctggaaacttcttaggaagttgagtctataagaaatactcagacataaagctccttggtagaataggtttgggagataaggtggtttgcatgcaagttgtctatcagtttgtgttattgttgctattttgattttatttgtttgtttctgaaacacagccacccatttcccaagaactgagaatgtcatactctggaaaacaaccactttttacacatctgttttcatcaaattccttctacctataaagtcctctaaaaacttgatgcatttgcagtttgtccgtccagacaatcccctctttgtgtattctctgaaagtctgaaaacaactgaggacaacttgaaggtacaagtgtctttctcggtctaccccttgcgtatcaatatgctcaacaaagagctgcattcaaaaatagatacgttattgagtacaggtcaaataaagagtgaacttgtttcttaaaggagaattctaacataatcaaggttagtgttgataaaaatgaaataaatgaagaaaagatacagttttaaagataaaatgaccagtgctggaaaagaaagcaaagcatagtttaaatcaatgtgctccatcaccgaaaaaggacgttagtaagaaacttggcttgttacatactttaaattctctgtttacattcagaactatatggttttaaaatattgtggtttcttctgagtaagtgtttctcaaatctaagtgttcctttagttcatacacagaaacctttttaaatttttttttcccaaatgttaaccatccagatgtagaatcatgtggtgagtcctcaaatacttacccttcagattcaatcagcagcatcattttaccagcctgtttcatccacctaattccagacatcacttctaaatacttcattataaatttctaattatataaagaccaatagtcttttaaaaaatataaaacacctgtaatcccagcactttgggaggctgaggtaggtgcattagctgaggtcaggagttcgagatcagcctggccaacatggagaaatcccgtctccactaaaaatacaaaacttagccgggcgtggtggcacacccctatagtcccagctactcgggaggctgaggcaggagaatcgcttgaacccaggaggtggaggttgcagtgagctgagatcacaccactgcacaccagcctgagcaacaaagcaagactccatctcaaaaaaaaaaaaaaaaaagaaaagatatatgagcaacaattactggggaaacttttcaaacaaagatttcagagagttggtcatgtttcttataaattcttagtggaaatcccagaagctcttttccagaattgttttctactctgagcacctactctgggtggtctttacttgcctcgagttcctttatcttaaggatgattcaagagaatccctgacccccaaacctagtatctgcaattctgagaggtggcgatctttaaccaatcatctgtttatcaagttttgagcaaaagtattttgaatggacatgagaattaggcagtaaaataatgtagactgaacaaaaaatgcttgggggagaaaaaagccggagaatgagttgtgtggctatcactggaaggaaagaaagggtccaatgtatagatctgattcatctccaaatattttcccactaaagactgtggaagtaaatatattgatggactctgtaatcactgatttaaaacgtgtgatttataattacaagtttcaggtgatttctgagaatgctttttctcttctgagtgtaccaaaaagaaccccacaaaattacaagtactaatatgttttctctttgaaccttgtctcaatggtgttcaaaaactttgatgcaattaatcaattcataaaacaccttgttatcaagtttaattagccttcacaaaacattcattcttcccgaacattctcctttaatctttcgttaatggtagagtgctaaatgtttcccttttttgctattattgtttatttaataaaacttttgatatagacctctccttttctgggtcatgcaaattgatgttttagtgatagcatttgatctttctaggaggcttgatgtacttgataaggtttcaacttgttagtgaaagtgagatttcagttatattaggcagagctttgaaatggggttttctttcttcataactttcctgaaaaggtgacttttcatgcagccaaacagagaaagttttattaactaaagagagaattaatggcaccaagtaaagtaactcagctggaaaggttttgtttgttttctttcttggttgtgtgtggtttatttaaacatctactatttttttaaacatctactatttagattttttttaaacatctactatttcttcataaggatgctgtatatcaaaacctccaaaaagaggtcagaatagccagtctaagtaatcaggacctgttggcccagtatttagctaaataaataagaatgtaagtgtactcctggctcagaagctggccagcaaatttgctaagtgattgatttgatgctaattttctgcatggacttctcatttccttcagggcctgtcctatgggaggaaataacttcagccaagctgactgagccctattttaggtttcactttgagctttgaatgtttggaaaactccctttcccagcaggactacatctccaaaggatttccatttatgatgacccaaagaatgcaacttgctctaaaaagactgcagaagttccctatgtccaaatcccagtacattccgaggacagaactgaaatcaacatatgcatggcaggcactacgattttgctcacgctaattctgtgtctctttgcatcagtactgactgttggagcaggtctacgctgagagccagggctgtgtttcttccctagtcctacgtaggcattgtcatattttaatttcagaataaccaccttctttgtcttagtgcattcaggaattaaggagaagaatagagatttttcattgcaatacacaatttatgggatgattgaaggaaatagagaaccatgacacataaaaatgtgtgataggatcacagaaagagcacttaactgcaggctatagtcttgagccagaaattgtctctccactacctctgggcaagttgcttcatctctctaggccatttgtggaatgggagccttaaactcctacaattttctagtaagaataaaagcaactttgttttgaaatcattctaactcaacagaagttgaagttatgctatcacgttggaatctctagttatagactaattattttcaatatttattacccaggaccccaaattacgtgaacttttggatgtggggaacatcgggcgcctggagcagcgcatgatcacagtggtgtatgggcctgacctcgtgaacatctcccatttgaatctcgtggctttccaagaagaagtggccaaggtatggtggatggaaattgctaaagcttatcatcatgatctgaatccttgagctatcatactaatgcctgcaaaagactgaatttttgtcatatttagcatgtgttaaaatttcacctaaaaataattcagctgccaagtataagtgcaattaaaatacttctaaataatggcatcaacttaagaattatggagatttttttcataaagaataagccatttggccgggcacggtggctcatgcctataatcccagcactttgggaggccgaggcggacagatcacttgaggtcaggagtttgagatgagcctggccaacatggtgaatccctgtctctactaaaaatacaaaattagctgggtgtggtggcgggcacctctaatcccagctaattgggaggctaaggcaggagaatcgcttgaacccaggaggtggaggttgcagtgagccaagatttgccactgcactccagcctgggtgacagagtgagactgtatctcaaaaaaaaaaaataaataaataaagagaataaggcatttgatatagtttctttgcataacaaaatacaaataaaaccacattctatttcatctaaacactttctcccaagtcattctctcttagcctcatccctatgccacttctaagtccgtgtcatttccagctctctcctaggggacagacatcttcagccctctttaaacttcttaatccctgggcagcaactagcccaccataatccatgtagtagttactcagttaatatgtagactaatgaaaaactaacagtttaaaataaaaattttagataataatgaaaataatattaagtaagaacaaataatatttattcaattacggattagaaagatgaattagatatggcccacccactgaggagctgccatttcactaggagcaagcctttcagatatttacaaaaatagctagaaaacaggtataatgtagcaaacaagaagctgtgaacatctaggacccctggattcaagtgcaatgctttctctagaaacgtccaattgtcattgaaagaatactgaaatgaacatatttaaagaagagctttctttttccatttttatagtttataaaatactagtgatagtccttctccttcatataacttccttcaagagttgagaatatgaatctaagaaaactttgagttctgcatataatatatgtgccttacagagcttctcatgtcatgcatcacaactacagggtcacttcatgtcagtgtgcattgtctaagtattgtgatctacaattttttaaccctcagtgctctggtgattttctgagctacaccagatgtgttggcctggttccttccttcctttctttcttttctttcttttctttcttttctttctttctttctttctttctttctttctttctttctttctttctttctttctttctctctctctttcttttctttctttctttctctttcctttctttcctctcttctttcctttctttctctctttcttttctttctttcttctttctttctttctttctttctttctttctttctttctttctttctctttcttctttcctttctttcctctcttctttcctttctttcctttctttctttttctctctctctctttcttgtttttttttttgatggagtctcactctgtcgccaggttggagtgcaggtagtggctcctgcactccacttggctcacttcaacctctgcctcctgggttcaagccattctcctgcctcagcctgccgaatagctgggactacaggcgcatgccaccatgcccagctaatttttgtgtttttagtagagacggggtttcaccatattgaccaggatggtcttgattgtcctggtttctgtgtcattagtgattattggcagggatttatttctaacacttatgtaatattgactttaattcttataatgggatgcataaaatgccaaccagttttaatattctaatgtctttagaaactactctttccaagtatgttgtaaacagaatctactttctctctttataagccaagttacccatttatttctatagtatcatttatacttggagagatttcagttcaatgaacattgtctgtgtgacatatactttattttgctgtatatgaatggatagttggatggataaattaatacagaaaaaacagattctaagtgtttgcaaaatatttttaaaatatgtttccccaaatgaactatattccttttataaaaagtgaccaatttatgggatgcactaaatctcaattaaaaacatgcaataaatggcagtggctttcagggaagcttttgctaagagtaaatatatttatattacacatcaatctgcatatcttaagttgcattaagcctttgtgcagtcctatctaaaatatatttaatttcctcttctctgtgggttactagccactaattttccttagggatttttatctccaatccctgtaatattccctctcaggagtgcatctgtagagattttcccaggggctacttgatgttcccagtataattaatgaagctatggagaatattttgccttccctggctgtgatgttctatagagtattttcccccacactgaaagtgctcagccagaaacttaagatttgcaagtaccactgttaccttggagcatcacgtatcacagtcacacagggagcctgttaaaacacagattgttgggccccagccccagcaggtctgggatggagcctgagcatcttcatttctaactggtcccaggtgatgctaatgctgctggtccaggcaccacactttgacaatctcttccttagagaagcttgggcacagtgttgccagatcttgaattttcttctaaaaggagctgcaaaatccatgaaaggtgttaaatattggcaacagttgtttaaaaacaccatgtgaaccaaaaaaacattaactatggtctgagtaagacttgggagcttccatttggcagctttttggtctagattcacattaagtaagaaaaacattgtgctaaataaaacctcaggtcctgaccactgaatacaatgggggaagcacgtaacattatcttgcagagcagaatcagcactctccaccacatttgttcattctctaacttccaaaccattcctagagccctctgggtgcctaagaaatgtgaccttttagcacagcatttttcagtagacagagaaccatctgcccccttaatggtcattgtggaaatttttcagaagttttataataggccacttttttgtgacttagattggatcctattcttaaccacagcatctctcatcccctataaaggaaagagagacagaataatataaaaagaaaatcttttggatgtctccaggttccatttttaaacatgtaacttgaaaattagagaataagggagacaaatcatgcctttgggccaaatttaaaagtcaagaagaacacaatcactacacaatgtccttacaacactcaacccattaattcaacaaatgaaaaccaagcaaatgagaaattactcctggaggagacaaatatgggttttttttgcttttttttttttttttttttttttttttttttgcctgctgaaaaaggtaagactttgttgcaaataaaatatgttcccctgaaaggccataattttgactctttttgagaaggaactaagtggcacagaactcatactcatgagttctgtaatttgggccccaggaaggaacacagtaaacgggagagagcactagagaagatgtctataaatgagaaatgttagcaatactcttctgccaaatggatatgagccttcaagcccgttgacagtttgggtacattcttcatccataaaatgaagaacttggattcgttcactcatttattcaacaacattttgttaagccttctgcaatgtgccaagtcctattctagatactggagatcaagcagtgaagaaaacagataaagacccttgccgatgtggagcatacattctagtgtgggagacacaataagtaaaataaagaagtcagccacgcagtgtattaggaagagagtgatattgacaaaaatgagatagggatggagagtgcagtggaaaagggcattaaatagggtggtcagtgtagccatctctaggaagtgacacttaagcaaagactggaaggaggtgagggaataagtcaggaggatgtctggagagacagcactgcgcttgcactacagcaggtgcaaaagccctgaggcaaaagatagtctggtgtactttaggaacagccaagggcaagcgtgacagcagctgggtaagcaagattgagggaaggtagtagcagagggaactgaggaggcaactgcaactgattttgctgtaggatggcataggcttttgaaggactttggcttttactgtgagtgagatggaagccccgagagggtttcagctgaggacagatgtgatttgacttaacatttaatccataatggaccgcatgggggaggggaaataatggaagcaagcagattcgttaccaaactattgaaatatttaggtgagttgctaatgacttagaccaacgtggaatgtggaggaaataaaaaggaatccaaatttgcatgtatgtacacacacacacacacacacacacacacacacacacacacacacacatattataaagaaggaagtgatggcatgtgtttatggattttatgttgcatgtgaaagaaagatgcatggaatcaaagacgatgttaaagttctggcccaagaggaaaagatagaaatatcatttactgacatagggaaaatataaaatagaatataattttttgtttagaagtatatagcagaagttcagttttggttacgttcagtttgagattattattaaatactcaactgggtgattttgagtaggtagttggatatatgagcctggaggtgagtgccaaatataacacgtaaatttgggggtcattgggtatttgattgtattaaaaagtcatcatactttttaatgaagctggatgagatcagccaggaagtgactgtagatagagatgtccaagggctgaatcatggacagtccaacataaaaagaatcagaaaaacagaagctgagaggaggcagccagttaatgccatgctcatgggaactgagccagattatttaatgttttactgaaatgtagcatacacagaaaagtgcacagtttcttactccataccctgatggagttttgaaaaaggaatatatccacctaatcaacatccagatcaagaaacagagcataaccagcaccctagatatccaccctactaacacctctatatcggcagttaacatgatagattagtcttacctgtttttaaaatatctgtaaatgaaatcatacaataaagtctttttggtctgacttctattattcaacattatattatgagatttatgagattcttctatattttctgtgtaattgtagtttgtccattctctttgctaagtagtagccagtaatttacttacagttcatgggcattcttgtagttgtacgtttagggctgctacaaataatgatgctgcaaacatctgcctttcagagagctagatattggagtgtaatgactggtcatagatctttgtgtgtactgctttgatagatactgtccttttctcaaacttgttgagccattttgattttttaatattatttcacacataaaagaaaaatttatcagaggatctctgtaggttaaattattacattttgaagtagctgtcatgtcacagaagaaatgcgctctctaaaaatatgttatataaagtgaacattagtctttaatgtttgtaattttagattcttccccctctgtagctgtgagtatcttggagagtctaattcacttatttcaaggatatgagtgagattttctggaagttttcgttaacttcgtctatatcagtttcttgtgcacaatctagataacacaccagctctctgaatttcctaactagctctcacatctctttcctgctccccattcttcctgccatcttgttaagcccttgacaggtctcatggatagtcattacctacctatttcctgaaattctctcacactttgctctacaaatctgcctgctcatctgcataagaatggccttttaaaacaacaaactcattcctgatcatattttaaatcattttcattctctattacctgcaaaatgaagtttctgtgcatttagtgaacaaacatttattgagggcctagtatgtgccaagcacctcgctgggcactgaggattcatcagtgacccaacatagtccctaccctcaggtactgatgatccaccactttgactgttgcaccattctgttctagcagctcctaactacttgtgattcttctacctttacaattgtaatattaatgcctttataatatggtagtttcctagactgcctttctctcttttgtccaccaagaaaagtcctaggcctcccgagggactcagcatcaactcagttcatccatctctcgctctatctcatgacttccatgcatagcccattgttctttcatctgttgttctgtgaaccttgaacatattttcaattacagtcattacactgtaattatcaatcagtgtgtcttataatctatcctgtatttgcgagctgatgaaagtcaaaaacagtagtttagtctgttttgtgttcccaggatctagcttagtgcttggctcaataaatgcgagaggtgtgagagaggaaaggaagggaaaggaaaggaaggaaaggggaaggagaagggaaaggaaaaggaaaaggaaaaggggaggcttttgaactcttgaaaataagtgataggtcacgtacaatcttagagtcatagtggcttttaacaccatgtgctgcaatcttttcatttagagttgggagaaattaaggccccttagcagattggttgcttaaggcttttcctagaataattctctctccagcttgccaggattctcagtaggaggacccaggtggcattcattacgatggcttccattttcctaatcttttttcccaaagctaaccttattcccactcagagttactgtgactgtcacttccctacccagcagttactccacgctttcttaagcaaatgaaaaatagcttctatttaccaaatagttgacacctttcaggataaggaaatgagagaagatgtcacggagaggggaatttcttttaagcaaaagaaattatagtctatgggataaaggtgggaaatagaaaagaaagagggacaagtgaagggttctgctaaggccacctccgggccattcatcaaaaacttcaggaattttcttagagttgccctaaaataatagtattagctatttaaaagtgacctcaagagacatgaggttcttatatttatttttattctgggaacatatgcattgaggtaagaattttgaaacacttgcgtatattctgtacaaaatgtgtgctttatctcgtttctattttgaatttcaaacaaatttatgatgagtaagcagtagctgtaagtttgactttaaatgaaaaatgattaagaaaaaagaaaaggtggtgccataaattgtgttcagcaatttgttttgggacataatggaaaactgtgcatgacttccttgcaggtagaatacatgtgccaaaaagatcactgtttgcaaacatgaaaagttagatccatgttattgtgttttgtgagatcatcattacctgctattcctgaccttattatattaaaaaaaaatgcctgtgtcatcttaggctattcttccacccaatcataaaaaggaccaaattcttactgtgtcaatacattgcactatttgtcttggaattttatactggtaggtgtcctttgttggagaatgagatttactctacattctgcacattttggatatgtgtcaggcaaatgaaggatgcacaacttaaacttttatattgtgaaaacatcgtctatctggaacatttgtttaaaagctcataagtcaaaagaaagacattcgtattaaaaagatttttattaaaaaaggggcaacttggatttcagtctctcccttacacacacagaagcagcagcaattgctattctggtgactgtggaagaaagcacccctgccttctgtctcctgggtgtcttttctgcatttgctagacaagaacttttttggagccagagagtgctcaatggtgcccacataaaaacaattaatgtcaaactgaagggaaaatgtcaacgctgagacatagaaatgactgtgatttcagactgtgggttactgttagtacaagcccacctctcccctgaaagagaaaacagaaaactgcatcagcaatagcatctcttctttccttccatccactccattgcagagacaagctactcttctgcatacctccatctgcctaccttctgatgcctggcagctaagtaagccctgattgcattaccggtgtgcctagcctggaagcaagaacatgagcaccacaaaaaaaaaaaaaaaatcaccgtgactttttggaaggaagaggagttctaagaaaatctggcttccttgtttaaatttctccctccacatataaaatattggtgttggcaggggaatactgacatactttgagaaaggcaggttgatctgtttcacctactaccttgatattggttgtcatctttagtagttaagccaaatgatgcccaatgaaaagctggcactaaggattaaaaatactttttgaaaataccttgctagtaattttcctgataactatattataattttcattcattcaacaaatatttacaggcataatcagccaatgaaaaggtgaaatcagaagagggaaattaaggaagatattacaagaaaatatctgagagctaaacaaaagtactggtcttaaagtctaaatagcaagtacaggaatggagtagattcaggtaatgagtaggaaactggaagatgacagataaatgaaaaagacttaatttttttctctccaaaaaaaagttaaagtagaagggtggggataaatgtaccagaaatgtattatccaaatataaaccatgctaaaacatgtaagattttcaaaaactgaaaaaagaacttaaaaagataaatatatacttgttattaggaatgttcccttcggaaagccatgtgggttatggtgttggaactgaaacaaataatctgatatattctaatatatggcctagcagaaaattatagttgcaatttcatactcatgtaaatttttattatatttgttttaaactttcagaatcaatttatatgcaaataaagtcataattatgaatgcggaacaagataaaaactgaccatttattttatttattgatttatttttgagacggagtctcgctctgtcgcccaggctggagtgcagtggcgccatctcggctcactgcaagctctgcctcctgggctcacccgccattctcctgcctcagcctcccgagtagctgggactacaggcacccgccaccatgcccggctaatttttgtatttttagtagagacggggtttcaccatgttagccaagatggtctcgatctcctgacctcacaatccgcccacctcggcctcccaaagtgctgggattacaggcgtgagccaccgcacccagccaaaaactgacaatttaaaagtgagtttaagctaacgagagttggaagtaaaaggaatggcaggtaaatgtcctcctatcataaaggagccaagggatactatttttaatgagtggatcaagagagtttgagtatgttgcttgagattgtagaggtgacagggaggaaagggcacaagtgatagaactctatcacaagcaaggagaaagggcaggtgagagatggaatcagagatttaaagcctcctcaatcagagcaggatattatagtcaaattctaaaatcagtcaaggaaaaacattatacacgcacacacgcacacacacatgaaaaaagcattacacacccatatatataaatagaaatgtgtaagtaaaccccagaaatttaagaatagaaatgctgaaaatagttgtcaagaaacagaactaggacgtagaagtgatcattgcctttccaacccctctgaacaacttttaagaaactctgtctctgtttcatcgataaataatagttttttaggttactatcatttaacaagcatatattacacctgtcactggtctaacatgaattatcccaattctctcaaaagccctatgaaataaattctattattgcttccattttataagatatatgaatattggaggacaaatttaaaaagacttgtccaacatgattctgtctttgcatttggcctggagtaacagaaaaccaaatcaaacaatagctgagacaaattaaggatttttaatttgtgttttgttcagtttttcttttcttttctttttttctcatgtagccggaaccctgaaggtagtgttgtgggtgccactgcctggggtgggcattgtgggtggtaagagaatttaccaagacagtgataggtaaagaaaggcagatttattagagaaagtttgaagatatgttgcaaaggtgcagtgggcagcacagcagagaaggggctgtctgcaaagaggcagggattggagggaagtttcatagggtcatgatggaggggttatgtgcagaatgaggtcatgcttctggagttactgggactacgtgctgaaggagctatttgggaacagagtgttgtgccagcgggttgtctgtgattagccatctcagattgttctccccaacctagggccctttcctcattgttgcttacttatcttattaggactccacaggtggtttctggcactgattcaggagctcagggataacaaggctgagtgaggcccctatgattctcgtggcctttttctcatagatcgagatgcctctgtagctctagcctttccatttacattccctacagtaaaaggaaaagagatctatatcaggaaacacattttcccagaaccctccagcaggcatctgcttacatgtgatttgccatgtggcacatgttggtcacccagctgctaaggacattggaaaatggatatttttttttcagttgaacatattattggcctgagcactgttgggcctctgttaggcaagaaggataaaatagatatgagatagcatttggcagaaggtcccagctagaaaatggtagaattgtgttctgaaatccaataaattataaccatgataagctagaacaaggatctgcaatatgaaagtcaggaagagccattaaataaactgatatcaatattttacttttaaattagaagacaagaaaaaaaaaaaaaactgtgtttaagagtcactattccaagaccttcacaggcagtgagaatggtcaaagatggaacaatcaaggccaaagacaaagaatcgttcttatagcagaggaagaactaacgggattgagttaccaagggcaaaataccctcttcatttgaagagaagaatctagcttgcaaaaaggtttaaaataaagttggaaggtataattaaggtaatttaaaacaaatttatttccaaatgagaaaattatatttcagcagaattctgtcattaaattataagttaatgaggaactacctgtgcctcgttcactaatcagttttcaagtaatgcagttttaagattgtcgaactgctttcataataagcagataagcagcatgcttaatgcccaagaattgcgattgctcccctttttctgtttcacatacatcttactaaggaaattagcagtgcttttttcttttaaaatccttttttatgtgatctcttcaaatggaattatttttgtaatgaacaacgatatcaattataattacagaccccgcttacatttattgtctatggtacacagcaccgaggcagatacaaccaaagtaataattaacactgagactgctaggattcaaaggcataatagcaagtgttttcataagaatgacatgagactgttggaagaatcatttcaggaatgtgagggattgacatgaaatccacaaaaatgaaactttgggggttctgtatatgagcacacaattagcattttctcagttgtacaaatgaataatgactcaggaaactaggaggagggaagggaggaggtctccccagtggatgctaagaatacacctgagactcccagtgatacagctgcagtcgtctcattgtgaaaacttcaacagaaacaaacatctctccgttcttctactctgtgccatggacgttgctctttgggggagttttaatttttcccgtggaagaattttctttaagttcattttcatttcatttcaccacgttaaacttttcccatttggcagaggaatgtcaagaagactgggacatactagaactggcagcctgaactcttccttagagtatcaggataccatttagaagaatattgcttcacttacctgaaaaaaagatacttgaacaacagttcttcagaatacagcccaaaacatcaaccaaagcataataagtatgtctacatagccaacatagatgcccaaacccttacacaaaagcttctgtactttattaattggagagcttgctagtcccatgttatatccaggactcctaatgtttgtaaactattccagtatagttcacattacaacagaaatgcataaagccagtattacaagccctctagccaagaatggttattgaaacttataacaatagaggagatataaaaattaatttcaaaagacataaatcataaagcatggaagtcagtctctttcatttacacattcacttatgcagtcaactcagtgattatgaatctattacctattttataaaaaagaatgcgaggcagaactatgagatcccacataagttatgaaacaacacacaccctttccttccgtctgctttcccacaggactcctaggtaatgggcatatgccatgtttgctatactctcccctcttctggtcattgcttccttcccagatccaattacttggttgtcgtggacactgctaggttcttacctgattgattgttcaagaggtagaccaatcagacctttcccagcattcttgttactgaaaatggaggaattagccagaccttctctggtggtgaaagataccatatgtgacaactcttggtgaagttggtggccatggggaagaacccgtcagtaaggaaaagaaaaatgccctcaggaagagagcagagtaatagcaatcaagaaagcccttttgcattcagtctccaaattcctgatgatcatgtatttattataaatgcattttttggctgcagtttgtccagtttttccttcaattacaggaaacgacccattgcacttgatactttctcctatttcttaagttagtttgagttgtgcttttgtcagatgtagcttaaagacatttgaataacatgatctgaaaataattatgcatctttccttgatttgagtaatattattatgctagttgtcctaatcatgacaatattgagtcctaatatgtttcctagctttttgttagttgggtttttttgtaattatgtatgattggcaatcatttctcttttggtataagataaaaacgagagcactttgactatgatataagatccacagagaaactataccagaattttttccaaaattctagatgttcagtatagtatcaaaagtgcagtcagttatcagatagtcctttctgattttaacaaaaggctttccagctcctgtaccatctttcaccatgaaaagattcttcactgcgtcattaagacattaaatgctcagcaggatgaattctgatgcatgccagtagtgacagaaatgtgttcagccaggtgaggcaacactgactgaatcacacaatgttcctccttactcacatcacacactgccacccccttatgagtagaggtaatcagaatgacaccattatcaatgacagcaataggagtttgccaataaataaaaaacaaatataaaatattaaaaaataggacctttacatgtctcaccaatattaaaatatcttgtttaaaattattatatgtcccagtaacttttaaatattaattcaatagaggacgagataaatagtgaaacacagagaatttttagggcaatgaaactactctgtgtagttaaatctccccaactctttctaatgctgtacctttttctggcgtgaaactagcctctggtaaacatacaaaactgtatcttgccctcagttatagatacttttaccaatgcagaaagttggcatggagctagaaatgtctaaagcttggccatgagcctacaaaatattataccagaaacatatttttgaaaccagtggttattattcttagtttaaaattatctattttaaggaaaattgatttttaatttgttagatagttactgtgaaatgctcttctgtgtcggcataaagcttggtgagcaataattttgcttctctcttgcagctattctgtactgtctttttaagtcctcctccaacatatagagttcaaggtctcagtatttctcacctggactactggactattacagcttcctaactgagttacccttctttggattctcagcctcaaatccatccttgacctggctgccagataatctgtctgatatgcagcctagccctggcatcacattttttactaatttatctccagacacctaaatgctctttatcctctgaccacaactctagtttgttgtcgcaaccccctccctcttttctaattcctattagactactttttgtttgctctaactcctgccatgttagctcacctctagttcttttcccagttttctctgctcgggattccctcttttcttccccatcactctatgttccctgctcctccagttccatcttgaatgttactgtacacatgacagcgtattatcggtgccttaagtcaggaagcaaaaaaaagacaaatcaaacaaaagtagaaacaacaaaaaaacaggtggcaaagcaattaaactaaaagacattatttcactttgggaggctgaggcgggtggatcacgaggtcgggagatcgagaccatcctggctaacatggtgaaaccccgtctctactaaaaatacaaaaaatagccctctccctctccctctccctctccctctccctctttctccctctccctctccccatggtctccctctccctctctttccacggtctccctctgatgccgagccaaagctggactgtactgccgccatctcggctcactgcaacctccctgcctgattctcctgcctcagcctgcccagtgcctgcgattgcaggcgcgcgccgccacgcctgactggttttcgtatttttttggtggagacggggtttcgctgtgttggccgggctggtctccagctcctagccgcgagtgatctgccagcctcggcatcctgaggtgccgggattgcagacggagtctggttcactcagtgctcaatggtgcccaggctggagtgcagtggcgtgatctcggctcgctacaacatccacctcccagccgcctgccttggcctcccaaagtgccgagattgcagcctctgcccggccaccaccccgtctgggaagtgaggagcgtctctgcctggccgcccatcgtctgggacatgaggagcccctctgcctggctgcccagtctggaaagtgaggagcgtctctgcccggccgccatcccatctaggaagtgaggagcgcctcttcccggccgccatcccatctaggaagtgaggagcgtctctgcccggccacccatcgtctgagatgtggggagcgcctctgccccgccgccccatctgggatgtgaggagcgcctctgcccagccgcgaccccgtctgggaggtgaggagcgtctctgcccggccgccccgtctgagaagtgaggagaccctccgcccggcagccgccccgtctgagaagtgaggagcccctccgcctggcagctgccctgtctgagaagtgaggagcccctctgcccggcagccaacctgtctgggaagtgaggagcgtctccgcccggcagccgccccgtccgggagggaggtgggggggtcagccccccgccctgccagccgccccgcccgggaggtgaggggcgcctctgcccggccgcccctactgggaagtgaggggcccctctgctcggccaccaccccgtctgggaggtgtacccaacagctcattgagaacgggccaggatgacaatggcggttttgtggaatagaaaggggggaaaggtggggaaaagattgagaaatcagatggttgccctgtctgtgtagaaagaggtagacatgggagacttttcattttgttctgtactaagaaaaattcttatcctgttgatctgtaaccttacccccaaccctgtgctctctgaaacatgtgctgtgtccactcagggttaaatggattaagggcggtgcaagatgtgctttgttaaacagatgcttgaaggcagcatgctcgttaagagtcatcaccactccctaatctcaagtacccagggacataaacactgcagggtcctctgcctaggaaaaccagagacctttgttcacttgtttatctgctgaccttccctccactattgtcctatgaccctgccaaatccccctctgtgagaaacacccaagaatgatcaataaaaaaaaataaaaaaaataaagacattatttcattgaagagggagccaagtcaactacaacaatatcagatgatgacctaggtcttgtgtcatcttctcttggagaattttgtaggggtttcagcccagaatgtgttgtgtgtttcaaataatcacgcagaatggaacttctatatttttttgtagacttgctcttttccattatcttggaagcctagtgagatcattgctttctggtatgaggtagggattatgattaggagattagtgagatattgacagtgttgggagaagggagaatattgcatattatgtggccttgtgactacatggtatggagaatttctagaactgtagttaacagttaaagataccagatatagctgctttggcatgagtagtagagcaggaagattatgtttgcatgttctgctggaaacatatttgatcatattttaaatttttaatgactctttatctgtttataattcaaggaaatagtaaaatgtgcttagttattgaagggaaacagagcaattttctatttatacaaattttaaaaagcagaaaaacctttatgtacaaagaacatctcctttggaaaagagtagtctctcagggacttgaatttacttatgtcatttttacccaaaaaagggataataatacaaaacaaaacaaaaaacctttggcatgcacattgaactaatgtgtcttcctggaagccaagctaaaagcatgtgtctaatgactgtgcagtatttaagctaatgcaagtgttatttacatttttcaggaatggacaaatgaggttttcagtttggcaacaaacctgctggcccaaaacatgtccagggatgcatttctggaaaaagcgtaagtcactctaattttattgctaagggcgttgcttcttctgagtcagtttcctttctcctttgtgagtcttccgtttatgccatactgacttctcacattgataaacacaaattttcctttgggatttattagagaactgatacctcccctgttcagaattggaagacttccaagaaagattgctctttcctccaagctgcacatctgtgttacacctgggctaagttcgcatgaatgtcagtgcttttgacacacaacaaagagacacttccaaatcctggcagctgtgctcagaactaaaaattattaatttcagataatcctctgcttctacatctgtgtgtgtcctctcaattattaatctgaggaacagcatatgttcctcatttctgtagagttatagatagatgctacaatacctttcctgactacttaaatcaataggctgacatcctgattccatcccatgtagatgatcccagcaagtattagtaagaaaagagaaaggatctaaaggaaagagaagaaggaaaataaggaaagaaaagcaaaacaaattgccagatcactctggaattgccacagcccttctaaaaattgtttgaccaaggaaaataatgacttaggcaagatgagcagcaaggaaagctggttgtgttcattttggaagctgtggttggtcaggaggttaggaagtctttaaatcaaaaccacaagtagaaacattaataggtggtcctctattttgtttaacagagttctgtcttccctcttcttatgtaagacatacccatcattccagacctaatacctcagccacattcctttattttactcttctatgaattccttttgcttttagtcaatacctcaggtcttcatttaagggcttttttatgggatcgcctcctctcctgagtttgttaacttaaggactcttccttcatgcctccacctcttcccttcctttcttcctctatgtttttaccttgtctttgattttatcatccttcttctagaatatgttttccagacaatgtttctagaacattcattcttccatgaaatgttagtgaaaggggacacagaggtaaataacatgttttatctgaaacatagcatgttattgctagttggctaatcaatctctactacaaatgtctattccagaaagatgtctccctatgaatagctactatggacatgtcttttagtgaacatattgttaatatttttgttgcacacatctagctttgggattgctgggccttagcgtgtgcagcttcctgaagtagaattcccaatgtatgcatccatcaacagtgacctagagttctcattctgagaatgaatatataagcaaacaataagcaaaatatggttagttctcagaaacatgctattgagtgaaagaagccaaacacaagagtatgattccttcatgtaaggtgcaaaaacaggcaaaagtaatctatgctatttgtagtcaggataacagttccctttggcagggcgtttgggaagggcttctggaatgctgctaaagtgacaatgttctatttcttaatctgggtgccaactgtggagacttgggcagtttgtggaaattcagcaaaatgtacaaaggcatgggcttttttgagtgtattttattgttcaagaaaaaaaagcttttttaaaaaaatcaaacccttgtttttctgcttctccaacagctatactaaacttaagctgcaagtcactccagaagggcgtattcctctcaaaaagtaagctttgtgagcatttctcattattcattttattttcctcaaagatctgaatccatgccatggctctgttttgtttctccagcagcctaagtgggagtgtggaaatgcgtggtagccctgtcctccctcacacatgtctcatgtcagtgcagctgctttcctcatagacgtctccccggggcttccctttcctctggcattattttcaagaaataccaaagcaggaagtgggtggaggaagtggagggacccttgctactaaggccgaaaggccatctgagattcagatctgttctaggagtggaaattggccgacctcagtgcctctttctaccaagatggctgtagccctcaagcagggtttgcaacctcagatgctaactggagccaggcagggaatgtaaatgatgaaacaggtcaggaggaggaggaaaaactaaagagcaaaccctgtctaaaggagacaacagctcatctccaccatatatcctgtgggactggtgagcacctgacactagattgtctaatgtctttatagaacccataaacctaaattagtatattaaattgtccagtacttaagttctatttttaaatcaaattagtaacgaaaaaaagtccatctctaggtcatatccagccaaaagtctttaacttttgacttacaagctactagaaagcttctgcgaatacacaaattaagccaagcacagtggctcatgcctgtaatcccagcactttgaaaggccaaggcagaaggattgcttaaggccaggattttgagagcagcctaggcaacatagtgagactctatctttgcaaaaatttttaaaaattagccaggtgtggtggcacatgcctgtagttctaactactagggaggctgaggtgggaggatcacttgagcatgggaagtggagactgcagtaagctgggatcatgccactgcactccagcctgggcaacaatgtgagaccctgtctctaaaaaaaaaaaaagaaagaaagaaagaaaagaaaagaaattaatttaaaagtaaacaaattaaaaattaaatttattaataatgcaatgtacaccttggggcaatgggtagtagcagcaaggggacagaattaataaggatgtttattttagtgcttaatattagagattatttaatgcaatattttttaattgggtcagcaccataatcctaaaatactgattttatactagacaccttaattttaaaagcacgcagttgatctttcagaagacagatgcaaatgcatggaggaatggttatcttttagttctttaaatatgaataataaatagatttgactgaatggaatattttgagttggcatcatctgttagtgctgtgatccatgtgccatttaaacctctctcctttgttgtgttcacttcacagcatatatcgcttgttttcagcagatcggaagcgagttgaaactgctttagaggcttgtagtcttccatcttcaagggtgagcatgtgtgttatgctatagtttgaatgttcagcccctccaaaactcatgttgaaacttaatccccaatatgacagttttgagaggtagggcctttaagaggaaattaagagcttccatgattaatgggttaatgaattaatggattatcatcggagaggaactggtggctttataagaagagaaaaacagacctgagctagcatgttcttccccctcaccatctgattccctgtgccacctctgccaaagtggagagtccccactagcaagaagacttttgccagatgtgccctctccaccttggacttcccagcctttgtaactgtaggaaatacattttgattcctatatattatacagtttcaagtattctgctatatgcatcagaaaacagagtaagactgaaaattggtaccaagaggtggggtttttgctgataacaaatatctgaaaatgtagaagcagctttggaactgggtaatgaacagaggctgaaaaaagtttatagagctagctagaaacagccaagacttggtgaggcctcttttcactcctataaccccagtatttcaatctagaatgacccttgctttttgtagataaaaaagtcacctaatcaggtaatatttttaaaatagtcaaaaaaggctaacattatcaagatgacaatttgaaatgtggtttcaaacttattaacaataaacccttcttgatgttttttttaagatattagctaatgatagtgttgagttaggaggcgagactcaactctggtggtggggtatgaacaccggaccaaattaaggaccagctaaaacagggggagcggaagcagctttccataagatatgtccatgtcagtttaccattgccagggcaacaccgaggaattaccaccgctttccacggtaatgatccaatgacccaaaaattgccactcctatcatagaaatttctgtattaaccaccccttaatctacatgtgattaaaagtaagtataaatacaacctcaaaactgcctgagctgctactctgagcacactgcctatggagtagccctgctctgcgggaacaggcatggagctgtaacactgctgcctcagtaaagttattttcttctaccctaccactggctcgtccttgaattctttcctgagtgaagccaagaaccctcgcaggctaagccctactttggggctttccagccctggatcagtgtgaagccgttatgtttaggaagatatttgaaatattaatttcatctcaccttagcattttaaaatgtttagttttaagatgtataagctatgtaagcaattagtatgctgctatgtgcttataaataaatatatttacatactttacagagctgtgctcagaaagtttttactgagggggtgcaggatctaaacagtttggatctaaacacctactttgctcatacggtggtaaagtaggtgagaggacaagcatgtaacatgctttcatttttatgcctgacacacacaaggtacatcatatacattaaccacctcaaataaaataatttgctttcattttgattcatttctacatgactggctctaaaatgatttgttactattgtttctggaagtccattgcataaaatttttttctcgtgcagagctctcctttcattatttttatctgagtatctaagcaacaaggaagcctttacctaagggtaacatgactttataggaagaacctttgagcccctcaaaatgtgccagcaatgttcaagttgcactgaataagtttgcaaagccattcttagacttatgattgaattataaaagtattgagtgctatggttaaatttatcagccaattattgttgtgaagacttttcaaaacagcaaagttcattaacaactttggtgggtcacaagaaagaaataagagcacctcttcactatcacctttcttctataggtggaaaaagctaatgaggctgcgaaaagtgagcagagctgtggaaaggctcccccaaaacattttcaccttcattttataaagcaaaataaaatgcttgaacctgcttgctattgcttttttgttagatgctttggaataggaaaaatataacaattaaggtcctgtccccgacttcaacaaatatttcttgagctcttactatgtgcccataggcattgagaatatggtggtgaagaaaatgaaactcaaggtttcaaggacaatagagtcttctggggaaactagccaataagcatgccaacaaatgcgtctgtaaactgggggaagtgctataaaaagaaagactggagaactactattgagaagaagggaagctcattccagaaaaagaaaacaatgctcgcaaatccctgaggctggaaataatttccctactggatttaagcaactgagaaaagaccaccgcattcaagcataaagagaaaacatgagagatggatttgcaaagacatgcaaagaatttttttccttttgcaatcacttctgattttaccttttctggataacctctggtaaaatataataatcaaaatatttaacttatgaatctagctaagggaaagaaggaatagaaaattaaatgtatgaaccaattccccgtaaattgtaattttctaaacaactggattctgagcagtcaataaatacacattgagtaatctactatgtttattatatgttcaaactttcagaccaatgtcaattgcaggcaaatttaaaaggaaaatgagattcaaataacatgagttatgtttaaattagaaaaaattatctctaacaaattaaatgtaatgataattatctgaagttggagaaaactttaaaaaacctctatgctaaaactttgaaaaattattattcatagtaaagtataatttacttggatgacttatagaattagaatgctttttaaaaatctaaaaaccaaagactgtttcagagctaggaaataaatgtttctgtgaactgactatgatgtatcaaaactctgttttaaatctctgtgataatttcattcctacataacaatgactctagaaaatatccactaattagcaaaaaattttggccatattcacaagaggtattttaaacaagccacggaagaaaagggttatataaatcatagttggttctgcgtaaatgggagcatattttgtagccaagtcatttaagctagatttaattgtgctctgtaaatagatatattaccagaaacacagtggatgtcctgttgagatttctttttaaaacatgatattactgcacattgttggggataaataaggcacttgaacttgtatcctggctgacgtgatccactagaataacatattcctttagaagatgctactctttagaaatcacagttgctagcctgaagttaccctaattgttaaaaggtagtactgtatccaaagagagagacaaagcaattactgtccttctgttaacaacccaagcatattttccagtgagacccttgaaaactgttccgtgttcaaaaaattaccactttacccacaaactttctgagaactgaaaatagtttatttgcaccaaattcccttgatttaaggcttattaacttgaaaagagctcagtgacatctggaattgtataatagtcttgccacagcactggcatacggagttgcattttaacgaagaagatcaggaataaacccatgtatttgtttcaaataataaagtttactgtagttggtgggcacacatgtaatacaaagagaaattaattattttaaatttgaagaattgtataaattttactaaatactatgaataaaatgtataaaataacttctgtgtgtaacttattagtatgttgcctttcttctgtgccttacatcctgaatataaatcagaagcaatcacttttgtagttgtgattcttaatatgactaatatcaaaattctactttaaaaccaaattaagtattccgttcattatgagtgatttacttgtagttatttcatgtattccatggctaattcaatgttttatttatagtttcagaataaaaatattgacagtatattgaatttctgaatttactgggaaattgtccatcaacttgtcaagaaaaacaagtctatatgtggactttattcattagagtctgcttcagtgaattaatatattttaaaataacattttttctgatttttttccgaaatttaagtacccatttctcatataattattttttaaatcaagaaatatataacgaagaaaatgcagaccaccgtcccaaaactaataggaatatttagtgtactggtttacagtataaggtatagaattaagcaactcagattcaaaatatagtcattgtgacctcatcacacccatttgctcaacccaggaccttagacaagttttgtaacctcctagcacttgtgtgttcctatctataaaagtagtacagtaataatgccaactgcatagagttgatgggattacatgaaaatattcaagtaaagctcatagaactatgtttgatatactgtaaatgctaattattattctcattttgagtatttttcatatgcatatattggggggatcttgtttttatttttaatttggcatttggatatgacattaccaggtctatggaatctagaaatgcaaatgccaccagtactaccaccaagattgttaaaatcttttcccttttgagattccttgtatataagcatggtattgaaacacttccattttttcaagtttgccagtactttgcagtttctaaaataaatgggcctcattcagattactaatttagattatactagccttcttaagtcatccttcaaaaaggccaaacaacaacaagtcatcactgacagtgcgttttgtattgggtgcctgatgtgatggaccacgtcctggattaaaacagaagacccaaggtctggtatcatctcctgggttcatccagcaaacactgattaggtatctattatataccaggcaccatgctgggaacacaaaggaattaaataagagattgtcatgtcactcaaaagctcatagttcagtagaaaataagaaatataaaaaataaaggaaaagctgtgaaatggatgcaatgatgaagatagataaagggagactgtgaacacaaagaaaaagtagtgtcatgtctagctgatgtggtcaggaagggttcacggaggaatatttgaacattgggcaggatctttagagtattagaccttggatttcctcctagacaaacaggaaaaatgaatccgtgccattcacttcaccaagctgtgagattgagaaagagaaagtctgtgaattagctttgtgaatttcagtcttgtttaagatgcaaggaattagggattatccatagcttttacctaaacatctcccctatagcctttcatctcagcatttaatgatgcttacttattttaactcctctttatggaacattttttcttccattttcacctactaaccccaaagactttggggtatcctcatcagtcaagttgggcaagagaaaaatgagacaaagaaaatcagctgtattgaaatattttctttcttcaatatgctatcatccaactcgcaatgaaaataatgttgtgtttattcagattatctctttaatttgactcctcctaattcatagctggtacataaacaatgctaagattttagtaaagcatattgttctatcaaattatgtgtcaggactcttacgtaaatgatgttagttaaatttgatatttcaaaggaaataacagcacatgcgtgctcgctatccatttctccacacttctcaataaattacatccattcatttagtaaatatttatttatacctactgtatgtggcacactggaaatagagccattaacagacaagacacatatcctagctcgtgtacatctgcagattagcaaagactagacagaattgtatagctgggagcacaatacattgagtgttgaaatgtgagacatgcaaggtgtgatgtgtgcacaactggaagacaaaatccagttcaaggggaaggcaaggctttccagaaaaagaagttataaatagacgggaaggaaaagagaggtcagtaagtgaaggatgacaattattgctatccttagatcaaattaatttatgtgtacgttgagtgaagttggtgaaagggggaatgaggtgaactctttttagtagggaaaataggagaacacccttggggttcataaaatccagtaaagctggaggcacttgagttggccagcagtgccattgagcatgttcttgcaattgattttaaatatttctcttccttgtgtctaacagccaatgagtatggtagatagggtcattttcatctattaaaaccatttacagagctcctggtgtccacttagagagagggtggtactgaaaagtgagcactctccggctaaagagatttctctctttctataaatcaagaggacttttggaaacctgcttgcaggttatacttgttccctttttatgaatggcaaaatactaataaaacaattcacaagaagtccccactgctcttggatttgaccgcttgtgcttatttcaaagtttgtgcccaagtagcccaagttataatgatacaacacatctatgtataatgattcatgtattgttcggttgtctcaaaattctgttttgcaaaatagattttttctatctctgtaaatggatttagcaaaggaaatattacttcattcattcaatccacaaatacgggtcttctgctgtctgccaagtggtgagctaagttctcctatctgtttgcaagtggtgaacaacttcagacaataatttttagacatttgtataactgtacatttcaaaacctatgaaaatagtcaaaggaagggtgtgttcttttgtttaagggcttgaaaaataaaaataatcacattaacacatacctgaaataggaagactgcatgaaaaatgtctttcctgttaacaaaggcttgaatacatgcttccggtttccatggcagcccaaccaaacagaaaaataagtcatagaagtggccttttatatcaatgacttgcttcctaaacaataggaccaggagcagtcagtgaaaaaataatgactggtgctgtcctacttatgaaaactgttttacaacttatcagattatttaaaccagagggaacatagtttgaaaataattgacacaaaattggaatttatgttttcattttgactatgtctgtctctagggtcattacttaaaaaaagaaaaaaaaagattcaagtaggaaaaaaaaaaaaacctaaaaataattctgtcaaacagactatctttcctagatctaacttgctttagaaaatgtatataggaaattgcattaacatccctttagcaggagacaattcttaaacttaaattaaactgaaaaagccacagaaaaaagggtttgacaccctaaagccagtgtccaaatgaacgctacggttgacctcataggtgtgttatgaatgtttaccctgacctcctagaagaaaaggaaaaagaaaggaaagagagagggagaaggtgagggaaggggggaagaaaagaaaggagagaaaagaagacagagaaaaaacagggagggaggaagctggggaaggaaaaagaccatttgctgactccgttgttttatttcccagaatgattcaatacctcaagaagatttcactccagaagtgtacagagttttcctcaacaacctttgccctcgacctgaaattgataacatcttttcagaattgtaagagtacacattttaagccatatctttttcagcttgcattgattctcaggtggctagagcaggacttggagtggtaattggagatggaagaacatcatacactgtgtctaaaagcaatattcctgtgtgatgttttggataggatcacacaatcttgcccctgaggtgcaaccactgcttttaatgagtacaagtttgctgtgatatattgctggaggtagttgtttttgtatgctcagataactttgtatggttgaaggattatgggtagaacagggagtcatcttggcttagcagaaatagactcatgtcgcaggaagaactctggattgggaaccagttattttatctctctgagccacattagcgacatgagaagtttggattactaagaaccctctcagctgaagaattatttgcttttctgttagaaattataaacttatatcaaggcattacctttttttgaaagattagaagaaaaaaggaaaaaaaagaaagaaaccaaagcactaaggcaaatgtggggaaagtagcagtttacctttcttaaaatactgaaatccacatgacagaaaatcaatacaaaatgtggtaaacaaaataaggatttcttcaaatggaagacaggtaaacagtactgctgaaaatgacattgcatattcttgctttgtgctgttcattgccatcatatatttactgaacatctgcaacatttgtaccactgaatttgtctttagatggtcaatacaattgaaatgggaagtttgaacaatatgttgaggaattatactctcttgttgaagcctaactgtaacttttaaaaacactcaaacgggttgtttactttaagtaatgacaataaatacatctttaaatgattacagatatatggagttggatgattaaatcaaaaatttactgtcataataaaaaaacctctgtgttcggtttagagtggtgcacccttatgcacatgatgcagtgttttcccactgtgggttttcttacccatttggtattttgcaagagcattgggttttagcggtagcaattgcacaagatatttgtagcccatagaggtatagaaattatggtggagaagcacagtgttttcagggcaagataggagtttcaatatagcattttcttatcaagtataagattttatttccctagagttaaatgcaaatattagaatgaaacttagtttaaaaaattcttattgcttggtttttcattgtttttagtggtgcaaaaagcaaaccatatcttaccgttgatcagatgatggattttatcaaccttaagcagcgagatcctcggcttaatgaaatactttatccacctctaaaacaagagcaagtccaagtattgattgagaagtatgaacccaacaacagcctcgccagaaaaggtcagtactttctttcacaccaaagggaagctcttgtttctgattgggggtagtcacacgctgggagttaggaacaccagtgatcgttaggttagtttcctctgtttacaaggcattcctttcggtctgaaatcacttggtggttcagtgcactaggtttttctttaaactttggtgtgtgatttttttgtcattgttgttatatgtatagatgcatgtaacatatttttaaaatgtctaatcctttattttgtttcaaattcacgcagtgactgaatgcatatttcatacaggaaatcactatctttaggttacccttttgtctttttctagtaagttctgtgaagtggcccacaagtttttctaacgttctaaaactgaagggaatatttagtctgtgagacccttatctttttccagtatatactatctgataaatactatctgataaatttttctacttggggaaatagtctaaaatttggctgtctgtgtaaaaaagcctagtgttgtaaatacaaaacaatccaaaaattgatagcccaaagacagctctaagttacctggaagtttttaagaaatttatatttttgattctgggaaaatgaattgccaaaataagatcatgaagatgtaattactgcaaattttcaactatatgtggcagcactgtccctgaacaagatcttccactgagaagactaactctcatctggattgaaatatcttcaccaagaaaattagtgtgttatcactgatgttattgcagattgcctagatattccatagggaggaaaataaagtacaattaaccaattattgaaaagaaatcaattatatattaatatgcaggcattttctaaagtaacagaaatagctctagcaagcttatggtcatcaataagaatgattatcataaaagtaaatttaaaagtcttttaatccattgtgtttaatctggaactggtcctctaaattgaaaatgaaatcatgaagtataaatgggcccaggcactgtggctcacgtctgtaatcccaacactttgggaggccaaggcgggtggatcactttaggtcaggagttcaagatcagcctggccaacatggcgaaatcctgtctctattaaaaatacaaaaattagtctggcatgatggcgcatgcctgtagtcccggctactcaaaagactgaggtaggagaattgctttaacccaggaggcagaggttgcagtgagccgagattacaccactgccctccagcctgggtgacagaggaagactctgtctcaaaaaaaaaaaaaaaaagaagaagaagaagtataaatgtaaaatctaaaaatctattaatcatattctacatgctactagttgggaatttttagatgcaattttttagttttcatttgttttcttggtgaagaactttgcctttgttgttgttatcattttcactgatgctgtgaaggtgagattagttaaaggaaacaactagcccaacagtatgtcttggcatggccaggcctgcccctccaaacctacttaaataggttgcccttccttccctagtacacaagagatgagatttccccttatcatgaagcagggaacatcttggaggttttgcccatgtagcttaggagttctcttctaaaatccaaacttctccaaaaataacgaacacattgttataacaaatccaacaacacttctaaaaatcagttagcccacgacactaggaaaacaaaaagcttttctgaaaccagtgaagcactccaaagtgtaagccttttccttttctccttccttcacaccacactgctgatggcacaggcttcagctggtatccaatgcctccatacatcatcctctgatgacttgcacgatgtagagggtacaaagagaaaaaattgtgatagattactgtaaaaccccataatcctagaaaaactgattttgattctaatggaaattaagatgatgtctcctagcatttgcaaaattatttagtgccattttatgaatttcaaatcgaaagaggcacacaaaatatttaaaaatttaaatatttttaaaggcaactttatctgtttttctataccttaatatgacattgatcacaaaacctctgtgtcaaccttaatagcagtataaagaagcaacatagaataatggttccacttttgagtttcaaagctgagatccacctcactagtttcatagccttatgcttaacttctctatgccttaattatttcatcttcaaaattaaggacagaagaattcttgatacgcttttcatagatttgaattaaataatacctgcaaagcatttggaaagaagaatctgggcctgtgtaatgtgataaataagtgttaactcttctcaatgttttgaagtgtagtatgttggttttcattcctcaggtgtcgttgtccattttttctaggagatcccatgatttctgggccttaaactttcttctgttttccccagcacctagaagatgcacctgctcatgatgaaatccttaatgtagacttgtagttgtgatctaatcagtgacccaaagcatttgtgccccaacttatcacttaagaatattgcctagtggtctctgtacagaaaaattttggctaatgctgtctctacctaaagccttatctagcacgtgggaaggacagaggctttggagtccaacggctagaatatggctaaagggccagccacctgctaccgtataacgtgcatcctcagtcaccccaggggactccagcacccgttcagaagttctggctggctgtatttgtagctccttcttctctagaatccatatgaaagaaattcaactcttgaggagttaaaagtcaaattacaaagaccttagtagggtcacttcagctttaaggcatgtacacaaaaacggactcatgatagctgccttgttttaggataaagggagattgtgcctgtttatgtttagttcagcgcacactagtcattcagtaaatggcctaaattgttattaacactgtttaaagcaggccaaatagtactagaggaagcacacagtctctggtgttctagtcttacaaactcaaacttacaagccaacctacgttaagtaattcataacttcagtatttaataaatcttcagtgaaaggcaagaggctacacacagtgacagacccagagataaaccctgtgcccctagagatttgcactcctcttaaaagtgtatatatatataattatataattatttattatataattatatataattatataattatttattatataattatatataatatacaattatttattatataattatatataattatatatttattatatttattatacagttatataataaataattatataattatatataattatatattatttattatctaattctatattaaatataattatttattatctaattctatattatatataattatttattatataattctatattatatataattattatataattctatatataattatttattatataattctatacataagtatttattatataattatgtatataattatttattatataattatgtataatatgtaattatttattatataattatgtataatatgtaattatttattatataattatgtataatatataattatttattatataattatgtataatatataattatttattatataattatgtgttatgtataattattatataattatgtataatatatatataattttttattatataattatgtataatatataattttttataattatgtgtaatatataattatttatcatataattacaatatatattattaacataatatctaaatatattaataatctaatatctataattaatataatatataaatattacttcttgaaatccaacgtgcacctgaatcacctgagccgttgttaaaatgcagattcgagatcctgcatttctaacaagttactgggtgaggcagaagatgcttagcaaaggcccacaccgagtagcaaagctctaagaagtaaagagaaggcgcattaagcatgaagataatgagatttcttcctgtaggggacagttcatggaagagataacatttgggctgaattgattttaacacagatgagctacagactttaaaactttaaacttttagtcaagtagttaatacatttggatcaataaacacataagaaaataagtagggaagtttagtattacattataatttattcttctgctgctttcattttaactgttttcagatgtgcccaggtgttagttaaattggtgttgatctcagtgctgatgtggaaattgagtcttatttacctgagaaaggcacttccatatagcctatacttgttataaaatgctaagcataagatacacacataatatacataatagaatataaacatatatataacatatatatacacacaacatagatatacacacaacatatagttgtgtgtgtatacacatacacagagacacacacacagtctctgatatcaataaacatatcttaaagtaggtgttaagcaaataaataatatacaaacctgacatatgctgtttagcttttatgtacattttacataatttttacataaaagatagacttgaaattaaatgaaaaatttttagtgtcaccaaaagcccaaatgccaaagccgaccatagtttagctgactaaaagtgtgacacatggaagtatgaaatgaaactccagaagagacaatagactttgatcttctgaggacctgctgtaattagcatgtcagccacatctccatgctggaatttctgttttgggagatgtgtatattggttataaataatcagaggatttctgtgcagtctaaggccaaatgggtcatgtatgtgggttccagaaagagagaatttgaagcttgtcacagaggatactattctcctgggagtgtggtttatttttactatttaaaaattacacattgaaaaatgccatggcctctggtcagcaaaagttttttcctttccatcttgtttgcactgtagacttaaatattcctggcacaggaatatgcaatgacccctgcctcttccaaacaaaatgttcatgaatatcgtactttcaagatcagtgtctccaaaacagttattttttatcacttaaactcttcagatgaaagacagtgagtaaaattagcatgaaaaatagaatagctctataggtacctttggtaacagaatgcagacttcaactgatatatctataaatgaagtccaaattttacttaaataaactgccaaaccaaaagaaagcagtaatttttttcatgcttttattctgtggagatcaggtgttcatgagtgtttgttaaataattgaattaatgtagcagattataatagcagatgtttcaaactacattccttttatcatcagttcttcctcctaaatttttataaggtatactatacaaaagcgtccccactttgttgtaattaagtcataaaaatgaagctctataatcccttttagtgatcactactcgctgagttaatagtttaatagttgaaatgaactcaagattataatggcgaagcaatttggttttaggcaaagttcagatacagcaagtgctttagctttttttcctttaaatagacctaagccaataatgattgtatcagtaggaaaaaaaaaccctattgcattttcaatatagttttatttaaagtattatacaattaagctatattctctcactgtcaacaccaagaaataggctgagagtgatagaaagagactggacttgggaaacttgaaaactgtagttttagttgagactccttcagttgaaaaacggcagaaacttaactcaaactaaagcactgaataaatttgcttgtgcatataagcaaaaagtcaaggtgttaatggtttcaggcatgactatatccaggagctcaagtcatgttatcgataattgtcttttttcatctctcatcattttctcatactggctctagttcttgggcagattttcctgaatgataagacagccaccagcagcgccaagcctatagctcaccagtcctagtatacagaaatcctttttactcatggttcctgtgaaagtcccagaatccagggcatggcttcggtcactcaaggccacttctaaattagaatcacagtgtcctgaaggatgggataaaaataaatggacaggcttaagtcatatgactccccctagagcccataaggggtcaactacctaaagcacaaaccacacggaccgacaattggagagagatggttccctaaaattcaaccaggatgtgcttcctaaaggaaggaatagtggtctcttggcaaatgaaaagagtagatcacactaaaactagttcagaaatcattcattcattatgactttttatttggccttataaagccatttaacttctttgactagccctgctccctagttttctcaactttgaaattatttcctgacagaattactggaagaattaaataagatgcttttgttaaagaggttacatatatttattgttgttggctaaattgtcatttacctgaactaatgaaaagtgatcattggcatttatgccaaattattttaaaacatttatgagtctagaagtgagactcagagccttgggctgaggcattcctgaacattgctgtttctcatctaacagccttatttaatgtactgcaattaaggataagtataataatttattaatgaaacttgaaaaaaatatggcatgtcacatctgtgcacaaatggtcctttctgactcaatcattcttttctatacctttttattaaaatggaattataattatagtcataagtgtaaggatgtacacttgactcttactatttacttcattatcacttcaatttcctagtaaattttttgaatcatatttttccagcaccatttcgctttactaggtagaagttataaaaactaatgatggtgatgattataatctctattctccatccttgaaagatcaaacatgccctaattaaagaaataggctggcatagtgtcatgatgaagccagtaaacctcaggcaagagacttgacttgtgtgagcttcaggttcttcatctgtaaaatgggatgagaccagcaatgtagcagacacctgtgctattcccatgtcccttggcaatcatggttccaacccagccacctacacacttggcaactcttcagggccttctatcagtccatccacagccaggctacaattcccagggactgcatgcctcaggagtagttgaagaataaataccttatcttccatgccccttgggttgcaaagttctgatgtgtgttctctgctttctcccagagttcctcggtgagactgagccctaactgcccacagctgtaacctgcctgatacccttctccttcttagctgcctttccttcttgtctcacttctcttctctactgttgtttcatagggtcaactcccaaaaaaggtgcttgcactcaaatccttgtctcagatcctgtttttggaagaacccaaactaagacaagcacttttctataaatggccttaagggaatcaaaagtgaaagatgggtaaggtcagagttgctgagcattgagagaaaaaaaaatggaaagaggctgtgcctcatcattcctgccaacctatcacgttattgtcttcgttgtttccaatcacgaagccctggccagtggcctccaatcatagatttccagtctacaaaggacttagccatttagcttagtcaaactgtcagtttattagaagaggcagtttgcagaaatggcaatgttgggaccaagaccatgttttctttgtcccgctactccagacatccacctaggcactccaacaggacttgcttagaaaaaagttgcaacacagaccatttagaagttagtgatcgatgtctatagcagtggtttccaagctggtcctagacatagcaccctttgtttgtttcttctaacaaagtctcgtgagaaaggccaatgtgtagggaaaagctttaaaggtgctgtcttggtggaatagaggggagcctggagtacaggtgatggtggctgttgccctatcactctttctcctcctgacctaccccattctctgcagggatgtctgcccaaacccagggatattcaggatactcagtttaaaaaccactcctctgaaggaaatactgactagtttaaagatctgcctcacaattaaggtggcatccatttaagtcattttatatagattacctacaaagtagttgaggaaacagaaccgacgtgaatcaacaaagtcaacacaaataagatcaattttctcccaaaagacaaaaacagaggaaaactatatgatgtagccaatgctttcatgccttaattaagttactacactgaaaaagctgctgaaaagctactctaggattttattgatcgaaatctcatttaaattcctcctattgactctctaacctctgcggaaggttacagaaaaatggcattgtcgtccctgagtgcattccaagttcttcttaacttcatgtttggtatgttcatagacttctctgaaatatttcagattgcctaagaatgaaaaaaaaatttttcaagatcgtcattgtggatctattgttcattggttgacttggcaactccctttgctttcctttccgttattacatttcctttattcccagaaggcagggcctgggcctgaggaaaggcaaaggcctggcctaggaattctgtttcttttctcctttatttcagtgacctcagtgtctgctcaggcccacagctctggccagaaagtcacagccctgtctactcacagctgaaatgtcctttgttcagaaaataaccagacaggaaaaatataaacagtaaaaggcaaaatcaaatgccagtccacaggatagataagtgagcttggtagcctcatcaaccccatagtctgctgagtcttgttaaaacttctttccttcatcacacctttcagaggtgccttgccatttcatgggagagctattgggacagagcagagaatggcttctttccccctagatgtgacctcccagcagaacacagcattgacaattgttggctagtatagctttccccttgtcagcagggtctaggagcaggttgcagtgcgtgtggggtggggtggaggggactctggctcagtcaaaactgcctggcaggttgtactgtgttgggagggagagaggccacaggcgtttggctcctaacttcggcattatccagggtcttgtcaatagtcaatgtgatacaacagataagtgggagggaaataggtcgaatgcagaaaaaaaaaaagcaaaccacagggaaaccagattaagtgagggatggaccttccaccctaacccttaatagaaaagctgaaaaatgtaccatagtagggaatcctgccaggaagtggacagtgaccaaggatttcaaaaatctcttatggagattctggaaggtctgtcttaactctgaatcactacagtctctaggatgccagctgtgacagcaaagattatctccaagctagggatagcattattttaacaggagagttaattgagaatgatggacaaaatcaagcttcttacctaagcattctaccttatatgtagaaaatgagcccaaaaaatgcttctgaacaatgtggctatatgtctttgttgagggttttcccagaagccaactttgaaagaagattcaagtccatagagtttggaaggtgattccaggaagtactagtagggcagtagggagtgtgaacgaggaagagaaagcagcttacaaaaaaatgtgttgtcaaggcagtcattcccaaccacagccattgttggaggatgctcttagaaagtgttaattcttaggcctttccagcctgcaccacataaagtcagccatcaggcagagatgcagatacaagtccagcccagctgtatctcctggagcaccagtacagtctgctatgatattattaccagcaaaacactattcacgatactataaaaaggatattcccacctcactttgcagctttaacaagaatctccagcatatcaaaaaagagatccttcaaagtacctgatgcttattgaacgcatttctttattctaacatatacctaatgcagttgcgtggacactttaacaatcatgtattacccatctaacttatgaactgctagaaaggggaacaaaatccagataagatatttgctctcaaggagcctataattacaaggagaaaattctaatatcacaaataattataaaacaagttataatgtgattcacttccatttcttcatctagctaatattcattcattcgtaaatatacttccattcattcatctagcaaatatctattgaataactatgtgcgagggaagcttgaaggaaaaggaaagttttgtttattgacattgtggggagtttccggaattgctctaagctctttacctgcaaattgccatggtacatttttcagcttttctatttcttgtacaaaacctcagacaagtcttcaagtgcatattattattcccattttacaatgaggaaagcgagtctttggatggtccagacatttgacttgttatactgtttgggaatgagttgagaggtaagtctaaaaatgtaacatttgtgacctgaatggaagccttcatgctattcttgacttactcgttggtttatttactcagcacacagttttttgagtcttgctacctgtgtcaacccttgagtaagacaatgaaaaggcaccattcttcacctatctgggctctcaatgtagtagaacctcctctgtagtcagtacagtggggaaggatgtgctgaaggcatctgaagaggaaactggcattccatgctgtgctttatgctgcagagcagagggccaaatgagagacaagaggcacttagggcactaaaagataacatgttttaagtagctcatcagaaagcattaatgagaacataattatgttctgggtctgcatttatgctagactatggaagagatgtaaataaagtgaaggccatggtccttgctcatacaacgccaatgtccaatttgatcaaggaacataacattctggtgaaggagctagaacatttttcctcccttgcattacggtcaggaaccactgtggagggtctcctctcataaagcactgtgacagtgtactcataaaaggcaatggaattggtttcctaccctctgagaacctctaattttaaatgataaatcagtacttatacaaatccatgttccaaacacagctctaaagctgtacttaagagagacaggttctaatctggattctgttcttatctttctatgtcattttaaaggggctatttaatctctcttgggacaactttgcttatctgtcatgttaaataataaaactgtcttctgcctaccaaatagaatgatgaggagtaaataaactcacagatgtgagaatactttgaaaaacggaaagtgctaaatcaaagtaaggtgttattattgagaattttcacacaaaaccacatcaaatagtacaacttaatacagggaaactgcaagcacacagaaagctgtgagcactgcgtgaagagctaatctgcaggagcttttgagaagagtacatagccatttaggggccattatcacaccatatcttggagctgtatttgcacatagttatggtaatagcacagtttttgcaatcaagatggaataacaatatatgacacttttcaacttaagataaaataataacacatgaaaacaggtgcagaacatactgactccagatttaggggaaaaatggtaaaataatgaaagaagccagtgaagttcatgtaatgtacaaaagcacagttagctggccagtgtgataggaaagtttgtgcccgggcaaagataactgagaagggaacatttagattatttcttaaaataggcaaatagactttggtgagccatgggatattaatgccatctgcacttactttctctgagctgatctagcagaattcgcaagggccaaagcaccaggaaaaaacgtgagccgagaaattgcttttcagtgctgtgcttagaagtgatttaaggaggtgctaaaccactgggctggtagctttccagtatgctctggtattattgcattaagagtgaagattgagcaatgatgaatggattctcaaccacctaatcccagtgacatccaaacatctgagtgccagatcctgcctaattggcatttggcacagtagaaggaggctggtgtccatgcaagctggcagacacattgtccagttttcccatcttgactgtgattattctacgtggatttatgggccatctgtcttccaaggcaaaatttgtagatttttctgtgctgcagagctctgaagatgttatttgcatgtgtttagctgtttttattttttaaagctaacctgcatattttttgcaaagcccacaaaacaatgtcacttcttgtgttcagcatttctcttgtcctcatgttggcatgacaagttttctgttatatttcatttttcttcctaaaaatcagattcatgggttgagggataaaaatgctagaggacatctttaaattacttgcagagattagaatgtaaattaagtcgggaaaagaatttggaccttgatagacaaattcaaatcaaagagctaatcctcacgcctctgccagatgggtcatttgtccaccggagctcagcttctttacacagaaagattaaagtaacacgttttagagagataagtaaatcatgggaaaactctgccttggtcacatttaggattatttttaggaccaatgcagagtgcccagattgaagccaactgccaagaaggcaggatacctttccttcccatcatccatgccccctatccaggccagtgttaggaaagttatgtggataagcaccatcaaccacacccaccactatctgtctttccattgcccaggcatgatatccagatccatttcacaccaaataaccccgtgccctcagacaagttgctaacatctctaagcctccgtgtactcaactgaaaatggtaatttaaaagtacgtctctcataggatttctatgcctggcatgtggtcaatgctcagtaatagtagctcccattattatgataattattgttatttaccttcttctatcactagatgatgtgtgatgtctacagcaagcagcatagcatcatgtttaatggcatgaaacacaaagactgactgcctgggctcaaatcccaacttactcacttatgaattgtataaccttgagcaaccttatctttgcttgggcacaaaccttgagcaagctacttgcctcaggtttcccatctataaaatagtcataaaagtacccacttacagagttactgtgaggataaaatgagttaatacttgcatatagcaagtagcatatcataaaagattgttaaacaatatgctggaaatattttaaatcatgaaactcttctaaggctctcttcttccttgcactttcctgttatactctttttttttttttttttagtactgcatgtgtaagcatggcctgccacatgttctttccttgatcctttttcctttagcacttggctactgctgccttaaactgcttttgggactagctcaggagcagttccatgctagttctttgatgccatgatgtgggcatttcctagctaaccatccagatatgcataccgagcagggaagagcctcagtgggggcccttccagagaccttagcaatgtgccatgagttgtatttagggattagtttttgactatgccctatgtacttttttcttgccctgattcacagagctcatgcaaagtgtaatgagagaattacgtgctgaggacttgctactgagctcagaaatttcagttaaatgaggggcatcagcttgtgttaccagaccttatttaaagttacattcagctgggcacggtggctcacatctgtaatcccagcactttgggaggttgaggtgggtggataacttgagatcaggagttcaagatcagcctggccaacatggtgaagccctatctctactaaaaatataaaaattagcctagcatggtgatgcgcgcctgtaatcccagctactcaggaggctgaggcaggagaatcgcttgaacctgggaggcagaggttgcagtgagccgagatcgtgccactgcactccagcctgggcgacagagccagagtccatcccaaaaataaataaataaataaataaataaataaataaataaataaagtcacattcatgaactcagtggaaagtgagagcctattaaattatttcagatactttacttgtgaacctaataggaaattctaccagggctgagcaaattcggaagctaagaagagatggcactgatggagcaggtggctcgcaatgtgcaataccttgaagtacagccaactctgctgtcacttaaggattgatttggcttattctgaattattctagtccccttttccagtctattttgatagctttgagcatttaatgctgtctggttagcacttcttctaggcagaggtagggtgtaaggataaaactttcaatctctctaagactttgttaggactcagccccccaaatccctgtctttcttccgcatatttgttggacttcagggtaccgttagtcagtgccagcgaggcctcttggttctgttctgtgagctgttcattgcatttcttcgatgttttcttcttagtccttcctttgtagtgtcatttacggctgaatttggaattgccgtttttagttgtctatgatacaatatcgtttgagatatctggttgccaagatgaagcacaaaaccactcacaatataaattaatacataaatgttaatatttggggacaaaataatcattttttcaattaatatttgttgagcatttacaagccaggcactgttgtgagttctaaagatcagcagtgaactagagaaacactgcctgtctgctggacttcccactgagtgcctgcatctctttgctgacagctctctttagctgccagagccccctcttcccaagggcgcagttggccaaagagtattggggaattatcccccggaagcagtcctcaaacagtgactgatgggacttggtataaatactccagctccctccccccttaaatgggatcaccttcaagtacatgttttgtctcatttccttcaagggaaacacaaactaagacactccatcctcatgaaactcacaatccctggatgaagagaccaaaactagcataccagcaaatatatctattagtacaatgacagatggtgataaatgctatggagaaatataaacagcatatgagacaggagtgccagcaggagagattgctatttgtatgggctactcaagaaagacttcatgttgtggtaatatttgaggagactctcagtgcactcaaaacaagtctctctctctcactctcaatttctattttgaaataacctagagtggtggctaagcactaagagccttccctagtgcctgggcatcagagagggaatctggtccaagctggtagcgctgcattacctcattcttttctggtcttggtcattgaccatccttttcataaccacagactcagctccatctttgccacccttgagtggaccgaggaggaactctctaaggctcaggcccatctacttagacacttctgcttcaataggttctggctgcttgggaataccagcagcaactttctggaacaccttctgggaaaggagccacagagcttctctcttcaggacatcaggcttgtctgcggtttctcctagacttgaggacaaggaagcctcggtatgagaatgtcctcaggaccaagcagaagaatgtaccttttcattcttctttctctgccatccctttcttccctaaagcaaaaggtcaaatgctttgttgctgcttgttttggaaaagagtaagagggactggtgaaggataaaggaggaaatatgtcaactctcaaatatgacaggattgaacacatgatttattttatcaccttagaatttagttctagaagtctccttattttttttagatttgatggtataatttctatggcagtgttttgaattcaaattgcaactttacatgacagacttagggtacagaattacaaatctggacataatttcctggcgattgaatcaagtatcaacatatctgatgaccaccatgacgggagttggacaagtcaccagcactcagaaaatcaaaggtcagcttgactcaatgttcactcctttagaaacgtagggagttgactgcttcttgcacgcaccaccgcacctgttccacaaaagcggccttgtgagattggcaagagaagccaagatatccaagctatttcccacctaataagtacctgggagctcaagcttcctctgtggctctgatggcactctacctgggagaagatatagcaaggagaacctgacagatcatccatatggtgccatctgtggtaagagattagtcactgcatacttctcattagaaaaaatataaagaaagccagggaatcccatgataagtcccagccaggcaaagcagaagaccttctgctcttcccatctgattcaccattacctacaaatacaagatcaaagataaggaacgtaagatctgacttttaaacttaatcaacaaaaatatctgcagtatggtatagtagaaccatggaacttcaggataaatatggtagattgaacatattcaactaactgaactttcttgaaaccacaccaaaactccattaaaagagacttttaagggcataatctggcaagggtgagggataatagataagaaatgaccattacataatttaggtatctggctatatgtttacagcagttgacagatctgagaacctgatcattgatcatccgtgtgaaaacctggaaccaatccaagttattttataaaaaaccttaaaagtctcagaaattgatgatgtttgtttcctctggaagtgggattcaagataaggcataaaacaaagaggagagttgacagctacttaaggaacaatcagaactcccaccttagagggactatttatgtatttattctttggagtcaggaaaacagagagtgtgaggatgacacaaagcccagatgaaagcaggctacaggccgggcgcggcggctcccgcctgcgatgccaacactttgggaggcttaaacaggcggatcacctgaagtcaggtgttagagaccagcctggtgaaaccctgtctctacgaaaaatacaaaaattagccgggcgtggtggcatgtgcctatagtccctgctactcaggaggctgaggcaggggaatcacttgaacccaggaggcagaggttgcagtgaggcaagataacaccactgcactccagcctgtgtgacagagcaagactctgtctcaagaagagagaaaaagaaagaagaaagagagacaaagaaagaaagaaagaaagagaagaaagaaagaaagaaagagagaaagagtaccattttgaaagcaagaagataaagtaattgtaagcatatgaaaaaatgctgagacctcctgcattcttctccaatcttgctctagaatgctggcatccaggccttcactctatcctggcaagagattagatagaagttctcccaagaatctaatctgcctaagaggaaagacctaaagatatcaatattagggattactccgaaagatacaaaggaagatccctctgcagtgatgccttaccaactctcatacttttcaagcacagcaaacacatccagaaatccaatcagctttttagtctgccaacttgaaatatgaacagataattaagtgttactagacatatgaggaaaacttccttaaaaacaggaaaaagcagggaaaaaagtaactttgtaggaaataatgactatatagtgagaattcgttaagtatacacatatcattaatgtccatagaaaaataaccaaatatattatgtccatgaaaaagaacagaatgctaattttttcaataaatgtcagagaacataaactggctgttaaacacaaaaacaaagcactccaaaaaaaggtggaaatacaattgaggaaatcttttagagagtaaagcaaaaaaattagatggaagattggagagaaaatgtataaaagtttaaaatccggtcaggcatgttggctcaggcctgtaatcccagcaatttgggaggctgaggtgggtggatcacctgaggtcgggagtttgagaccagcttgaccaacacagagaaaccccatctctactaaaaatacaaaattagccgggtggggtatggtggtgcatgcctgtaatcccagctacttgggaggctgaggcaggaggatcgcttgatcacctccacctggaggtggaggttgtggtaagccgagatcgcaccattgcactccagcctgggcaacaagagcgaaactcagtctcaaaacaaagtttaaaatccggacaaataatattccagaatgaaaaaacagaggaaattatcataataattcatgtttttttccaaacaagacaacagctttcagactgaaaggtttcaaagagtgcccagcataggggatagataaacctatgccaaagcacatcattgtgaaattttaagaaacggggaccaaaagtgctagaaattgccagagggacaaaaaccaaaacaaaacaggccacacacctgtttttaggatggtgaatcacaaagtcttcaaacctcttaacagagctaaaagacagtggagcaaatttttcccacaaaaatcttttaaaaaaaaatccaacccaaaatactgtgtccagcaaaactagcaatcaagtgtgcaggtgtaaagaagtcatttttagacatgcaagcctcaagaaacttaacattcatgaatgctttctctggaagctactgaccaatgtgctctaactaaaattaaaaaattaacaattaaaggggaagacatggcataaataaaagagatttagcacagaatagaagtgaagaaaacagaaattaatcaatctagattggagcagataaaaggctccagaaaagacttcaagagaatctaaccaagagaacacttgttatatttgtacatattgcaaaaacatttagctaaccgggggatactttggagttggactggagatatatgcaaaaaattaagcaaatgataaaacaagataattaactatagggaaaattttaaaaaattgtgcatgaagataaaaataattgttaggttactgtatgactcaaccctgaacacactgtgtagtcatgataacataaagactgaacactgtaactaaattatagtattactgtctctgaaagaatgagagtaatgtatacatgtgctacaggagtagagataagaaagagcaatattctcatctttcatggtggtaagtcaaaaatagcaatacatgcgtattattttgagatacagaagtaaataccaaaagcttctgctaaaagatttgaaggtgtttgcttctaagtaaggagacatgaggaagcgtgtttctattaaccatcctagtaaaagtggtgctggatggcagccatagaataattctaaatttagcagataacccttggcttctcgaccatgttgtttttcctattcttgtctcctgaagtggtatctgcacatcaagagcaaatcacacaggtggcttcttagctccccttggtgactccacacactggagacattcagcccctccctactccttccttctaaacttagcccatcggcaatcaacgctgactgatttttcttcatcttcaaccagacttgggcagcagaatggtagaaaggaaactggagcagagctggatcaaaatgaattgcttctttcagaagagtcctgaaatttacatccccaagaaggttcctatctggccaacatgaaattagtgtgtccactaactgattgcatgggctgcaactccaaactctttcgtgttatatgcactaagaactacactaaatgaatagaaacctgaactgatcagcaacaggaatcaaggatgaattttatgtgccatgtttttaagttcttgaaaggcaatgctctgatggacacatccttggttatttccaacccttgacacatagagatgcaccctcagtaaaaacgtgttcattggtaaccaccagtaaggaataccctagctccagggtgcgttcaaaacattttgctgttgctggagaaatatgaactgaaaacatcttttcccatgtacctgaaacaagagagtcaacccagaatgtctccttaaaagtaggtttttagaagctaatagataaagggatccgaacctgagaagatgagagaaccactccacaatgctcttctagaccattcttcctttctgttctccagggctcccttttctggatacagatcttcctcattcttaattgttgcaaggccaatgggatggccctgagtgtagaggaggcatcagagtagcccatagcccagtaaatactcaagggcctttgtatgcatttgcaagcatgatggcatccagctgagtgtcactggatacacttcagggttttaaagcatgattttaaagcatccctggaaggtatcattacgtcatagcagaattttgaattgatgtctttctgacatctttaggagcattgttttttccattccttgagggatttacatgttttgtacttcagctggaagtggtacaaacactatgtttgtttatgaagacttttaaatgccattatatgagtgacatgtccaatggcatactgatttattattaacaaaatatataaggtaatttatttttagcctttgtcaactaactttatccttctgaactcaatttctctttctggtgattttatttcagaaaacagtagcattgcttttactgtttcataatctcactcaaatgtgggacattttgttttaatttagctagaaataattcctaatatattagcctgattgaattcatagacttttagagctagaggagactgaggcatccatatagtttactcatcctataattaaggaatttgtccctgaccagtgaccactggcaagaatggaagaaaactggatttcttgtgctgttactaagttttttagaaaagcaatgtgttttgttatcttaattctcaaggtttttcattcttctatgtgcctcagtggaccagagtggatcagaaaaaaaaattgtaaatttttcacaaacagtgcaagtttgatagaaaagggctaatgcattttagtcaatggcgacaataatattccagctgaaggttatatggaagggatatcctcagagtttgttctctgccccaagtctttactagtcagaactattttttaggctaattcattatgacaaaacatctgtatttttgcaaatactcttgaccccttagctgacacctacaagattacaaactgactgctctttatctttacattttattggctttccttgactttgacatatctctgcctaatcatttaatgtatcaaaaatcttcagcatttgctccttttgttagcaaggcaaagctttgggattgaaaagttgatccctggttcacagttacagttccctgattgcacagttattttattgctatgatatgcatgtgtttacaagaagctcactggtagtctacaatcatattctacccaaactacccttcaaactcaatctttgttcttattcaagtttaggtaaattccttcaccagggatttttaaattctttaatataattataaattatcctcacactcactcaccaaactattgttgtttgttgattttaatgtatactaaaaattctgttaaaatattttattccaatgagataataaaggtagagaaaataaccaaaaaggttatggtttaattgacctgtagggtattaactagtctgtattcaatttagtaatatctgtctagtttgtgtttttggtttttggtttatttgcttggtttttgttgacaaaaatatacaaatacatacatacaaacacatacacatacaaacacatacatatatttgtgtatatatacttatatgtatatatgtgtgtatatgtgtgtgtgtatatatatatatatatatatatatatatatataatatatataaaatcagtgtctcatagcctcctttgacctggctttgacaacttccggattaaataaaacttggatacacattctttgcatgttccaaattataccttgaccttgattataatatcttcatttgagtatgacaaatatatgaagtgtacaccttcacttttctatcctgtacccaaggcagacatcaaaattaatcacaggcatggttcagaatctttctcaacacaagcacccagaagacattaacaataaatggaatttggagctaaagttaaaatccatttgtcatttctgccctattggcctatgttgttgttttttcttgcttttaaaagttgctgatcaaaccaaaggatgtttattcttgcatttcattcttgttcttctttcatgttcaataaaccattgtattagattgcacagttattttattgctatgatatgcatgtgtatacaagaagcatacacttgccagttttccataccctgtgactcccccagtatgcacactcatccagcagttacattactttcctttcctggcccctgaagatacttgcatttattgcctgtcttttaaggaattgttatagttagagattgggttgtgtgaaattgccttttgcataggtgaaaaacagcaaatattacaaatttcatatcatttgacctaatcagaacataagaatcaaacaaaatgctgctgtctttggtgatcttccagtttcaaaacaatttattttctattttgaatcccaataatcatccaaaagaagtagtgatttagcacccactgtgcacaaagcatctagtagacaccagggacgacaaagatacatgcacattcagcttttaaaggtgctcgtgcctgggtttcaaggggtgaatggccttattttctattagacggtgagctctttgaaggcagaggctgtgttttactgtgctttatttttctgtgcatttatcgtatggtagatgttcaataaacctttgtgaaattagtgaaaggaaaagagataggggagaaggaaaggaaatagagagaaaaggagaaatagagattctggtgtgaaaagcacgtgcccaggcccagctcagcggctcacgcctgtaacctcaggactttgggaggctgtggtgggaggatcgcttgagtacaggtgttcaagaccagcctggggaacataggaagacccctgtctctacacagagaaaaaaaattacctgggcatggtggtgcatgcctatggtcccagctactcgggaggctgaggcaggaggattgcccgagcccaggaggaaggtttttcttttgcgaaacagctcctctcatcaaaagagccaaaacaaactttccttcttattttttattcttggacaatagtaaaagcaatttagctattgagtttccagaacttgggaaaagcagtcatcggtcaccttgagaaatgtattgaatgtgaaaagatttttactgtggtaaataatcagtgctagctttgccatttacaaatggcacatctcttagcaatcaagaataaataatgtttaaatcagtaaaaattagaattgttaaatgttgtcattttactgataggtttggcagtaggggagaagagaaggaaaacagatacttttatataccattggtgaaagtcaattgctaggactttaacagaaagaaaattggttatgtgtattaaaatcctcaaaagtatgcgaagtctttgaatcagaaattctatttctgggaattcatcctgaagaaataattaagtatttatacaaagatgtaaccatcagagcagtcaatgcaatgtcatttatactagtgaaaaaattagaaacaactttaatgatcaatgataatagaatattatttcatattatactgctatattttatgatataaaaatatagatagttgcatattttatgctatagttaaatatccgcatagaatttatttttacattaaaaatgttcataatatattgctcagttaatacaaaggttactaaattatatatataattatatgtatgtgtgtatatgcatgattacagcttcataaaagaattatacacacacacgggtatttttctgggaggatacacaccaatgttttagcagtagttatctctgaaagaaaagttagggatgttcaaaacaagttttattttttctctctgtttatctcatttcccaatttttctttaatgaacatattccacttttatagtaataaaaactgtttcaacaagaaaaaaaaaagaaatgctaccctccgacatttgttggcaacatatttactacccgcaaatatgttgtttgaagctttgattgtcaagattgaagaaacaaattgtagtgatagaccaaaatacttaagatgatcctatgtatctatgaagattatgacaaaaaattgtctcaatacgtgtatcaaaacatccagttgtacaccttaaatatgtagttttttaaattatacctcaataaagttgacaaaagaattttgtcaatatttagtattagtcaactcagaaaggttacaacatagaaaaatttctaaatagaatctgagtaaactaaattacctgtgtcatatttctgccatctgaagtaaaataattcttaatatgagatttaaagatcttttttcatgagcattcaaatttttattttcaggaaagactcatttgtgggcatctttattttctgtttcagagaaaaatatcattatttgaaaacaccttttttttttttgagacagagtctcgctctgtcacccaggctggagtgtagtggtgcgatctcagctcactgcaaactccacctcctgggttcaaacaattctcctgcctcagcctcccgagtagctgggactgcaggcacccgccaccacacccggctaatttttctgtatttttagtagagacgaggtttcaccgtgttagccaggatggtctcgatctcctgaccttgtgatctgcccaccttggcctcccaaagtgctgggattacaggcgtgagccaccgcgcccagccccaaaaacactttaacattattttaaataataaaaccacttgtaaattatttatttatttatttatttatttatttatttatttttattttgagaaggagtctcgctctgtcgcccaggctggagtgcagtggcgccatctcggctcaatgcaacctccacctcctgggtgcaagcgattctcctgcctcagcctcctgagtagctggattacaggcgcccaccatgcccgggttaatttttgtgttttgggtagagaggagacttcgccatattggccaggctggtctcgagctcctgacctcaagtgatccacacgcctcagcctcccaaagtgctgggattacaggccacttgtacataattttgattataaagtaacatacattaataagaaaaaaaattgaaaaattaccccaaattctattacacagagataagcactgataacattttagtgccgatccataaagttaataccagtcttacattggaaaacaggaggttggtgtttatttaaatcctctgaaaatttggtggggctcatgtaactacatgttttctctattgtctgtgacatttggaaataattgtagtgaaacagaataatcctacactcttatttatccatactaaaatgtcttctaccttggacactacaagatatttctggaaaaaaaaaaaaaaagaggcgacttgacacccataaaagaatgcattcacatcctttctaacttcatttcctccaggacaaatatcagtggatgggttcatgcgctatctgagtggagaagaaaacggagtcgtttcacctgagaaactggatttgaatgaagacatgtctcagcccctttctcactatttcattaattcctcgcacaacacctacctcacaggtatgaattttctagttctttgttactttagccagtctcaccaaatttcaccaacctctactttctgttgttcggaagctgaagtgtgttttcttccatttcctgcgaagtgcctctgagaactctggggttccaccactaaagcctcccgcctcccataagcagtcatgtccacatgtgtatgaagcaatagcatcatttctccacagcctaagtttttaagtcttctaaaatgcaaccacggctgacattttcagatcaatgggatttttgtgtaactgaactcattcttcagtgtacttgaagccatgtccagtcctacccggttctctgggctgtgttcatctacatgacagctccgaagttcttaagtggtggctcatgcttgtaatcccagcactttgggacggcgaggcgggcggatcacctgaggtcaggagttcgagaccagcctgttcaatatggcgaaacccctgtctctactaaaaatacaaaaaaaaaaaaaaaaatcagccaggcgtggtggtgcgtgcctgtaaacccagctacttgggaggctgaggcaggagaatcacctgaacccaagaggtggaggttacagtgagccgagatcacaccactgcaccccaacctgggtgacaagaatgaaactttgtctcaaaagaaaaaaaaaagaattaagtaattgctttttgttcaaggtaggacagggctttagacaaaaacaaattgacctgtgaatgacaacttatactttattgtaaatattataataaagtaggataaaacatcaatgtgtttctaatctgatcttaaattaagccttgacctatttggcagtctggtgaagtgtatgcacccttctcagaatgctaaatgcataaattaagtacctagaattaaagaggaaataaatttcattgaaatatttttataaaatgttatgatatataaccttgtgtatctcagtattaacacaatttaaataagtataagtaaaatgttgtgataatttgcaacaattggaatataatacacagatcttgctagtgacttgtaaactacatacttaactgaagagaatgttaaattttgtgtagaggttaaaattaaaactgtaaccattctttctcatccaagttcaaggaggttcatggaatatcactttaacagtctagatctttgacatgataaaattcaaagaagtataatttttaaaatctgagcacattatagaatcttacatttatcctatatttaggaccacaaaactcaaaaatacttaaatatatgtccggttgaattttgggtattgtgtgtgattttgtttaagtggaagtcacaatatagagtagattttttacgaataatcttttgagtccaaaataccttccaactgatatatttatattcattacattctattttatttgtcatataataaatgagtcagtaataccaaaatgattgaatgacaagactgattggatatacattttattttttcaccttctttcagagtatattaatttttccctttctgactatcactagggttttcagattttatgtatgttcattcaatcgcggctgccattctccttttgagagaccaaattgtctcaactttggttagtaggagacatttttaggctatcatctgtgtcctcttgacatgacctattaatctttgaaagtgttctggcacatagagatcttccagactcaccttattcctttctgctccagagatggaaacagactattctccagtgagccctggttctttttgatgggaaagaaaaagtatgagtaacagcaatttggaccctgaacattgcctggactgtttcagtgaacaaaggaagaaaagataatttttttttgtctttttaaggcacgagttcacataaatatttctacttctacctaccaatttaaattattattattattattattcttgagacagggcctcactctgttgcccaggctggagcacagtggcatgatgatagctcactgtagtcccgatctcctgggctcaagcaatcctcccacctcagcctcctgagtagctgaaactacaggcacgtgccaccacacctggctaattttttatttcttgtaaagacaaggtctcactatgttgcccaggctggactcagactcctgagctcaagcaatccttctgcctcagcctcccaaagtcctgggattaacgacatgagccactgtgcctgtccccaatttaaattatttttttaaattatttttccataagttataagggtataggtggtatttggttacatgagtaagttctttagtggagatttgtaagatgagatcctggtgcacccatcacccgagcagtatacactgaaccatattggttgtcttttatccctcaccccctgccccaagtccccaaagtctattatatcattcttatgcctttgcgtcctcatagcttagctcccacatatcagagagaacatacgatgtttggttttccattcctgagttacttcacttagaaaaatcgtctctaatctcatccaagtcattggaaatgctgttaattcattcctttttgtggatgagtagtgttctatcatgtatacataccacagtttctatatctactcattgactgatgggcatttcagttggttccacgattttgctattgtgaattgtgctgctgtaaacatgcgtgtgcaagtatctttttcaaatagtgacttattttcctctgggtagatacccattagtgggacggctggatcaaatggtagttctacttttagttctttaaggaatctccacactgttttccatagtggctgtactagtttacattcccaccagcagtgtagaagtgttccctgattgctgcatccatgccaacttctactgttttttgattcttggattatggccattgttgcaagagtaaggtggtatcgcattgtggttttgatttgcatttccctgatcattagtgatgttgagcattttttcatatgtgtgttggtcatttgtacatcttcttttgagagttgtctattcatgtccttagcccactttttgatggaattgattgttttctccttgctgatttgtttgagttcattgtagattctggatattagtcctttgtcagatgtatagattgtgaatattttctcccactctgtgggttgtctgtttattctgctgactgttccttttgctgtgcaaaagctctttagtttaattaggtcccagccatgtatctttgtttttatgcaattgcttttacccaaaagcaatttttggtcatgaaatccttgcctaagccaatgtctagaagggtttttctaatgttatcttctagaatttttatagtttcaggtcttagatttaggtccttaatccatcttgagttgatttttgtataaggtgagagatgaggatccagtttcattttcctacatgtggctagccaattaccccagcacactttgttgaaaagggtgtttttcccccactttatgtttttgtttgctttgtcaaagatcagttggctgtaagtatttgggtttatttctgggttctctattctgtcccattgttctgagtgcctatttttatgccagtaccacactgttttggtgactatgcccttagagtatagtttgaaatcaggtagtgtgatgcttccagatttgttctttttgcttagtcttgctttggctatgcgggctattttttggttccgtatgaattttagaattgttttttctaactctgtgaagaatgatggtggtattttgatggagattgcattgaatttgtagattgcttttggcagtgtggccattctcacaatattgattctacccatccatgagcatgggatgtgttttcatttgtttgtcatctatgatttatttcagcagtgttttgtagttttccttgtagaagccttttgactccttttttaggtatattcctcagtattttttttttttttgcagctattgtaaaagggttgagttcttgatttgattatctgcttggtcactgttggtgtataaaagagctactgatttgaatatattaatcttgtatctgaaaactttgctgaattctcttatctgttctaggagctttctagaggcgtccttaggattttcaaggtaaacaatcatatcgtcagcagtcagggacagtttgacttcctcttcacttatttggatgccctttatttctttctcttgtctgattgctctggccaagacttccagtactatgatgaagaagggtggtgagagtgggcatccttgttttgttcccgttctcaggaagaatgctttcagcttttccccattcagtattaagttggctgtgggtttgtcataggtggcttttaattcattaaggtgtgtcccttgtatgccaattttgctgagctgtgctctttttagtaatcttgatacctaacagattatacatactaactcattttctttactgaaaaccttataatagtattaagaaaattttcaatattaatacaaataataaaactacaaaatgtagttcaaatttgtgtatgcagtttttaaattacatttcactaaaaatttacaatcaaattaatttcttcttctaaattaatttcttctgaagtcattcatatgcccttcctatgtataacttgttaaacacagatgtggtaaaaaatttggctccattgtgtcaggttagtttaaatttgagggtgttggcatattaacagctaatcagactaaaaagatgatgtgatactttcagctattaggaaagaaaagggtttaccttttttatgaagaaagaactctaatagctgtctccaaatttctgtacaatggttttgtatcaacaccatctgattcatatacctcgtttctggtcaattatctcttcaattatttaatttctagtactgttagaatccacatattttcaaatactcagtttttaaaactatattaactatgttaaattgtattctcatctaaggggttttgtttttgctgttgttttttttttttatcttgctcccttttctgagctctgtattattataccaaggtttgcattagataaatctgtaaccactcaactgggttcttcttgcctgctgcctagaaaaagccaatacactgagaacagcaggtgttacaacagagaaagtttacttattgcaaggcagtggagcagaaggatgggacatatttctcaaatcagtctctctgataatccagaagctaggatttttcaaggatagttaggcagcagggggttgggaagtggttagggaatggggaatgctgattggtgggtcaggaaagaaatgacatgggagtcaaagctgtcttcttggactgagacagtccctgggagaagttaagtctgtttcttggcatgggtcacaggatgggtggcagtagttggtccatgagaattcaaggcctgaaaaataccttaaacaccagtcttaggttttataatagtgatgttatatataggagcaattagggaggttacgaatcttgtgacttcagtcctaaaccataattccaaccttgtggttaatttgttagtcttacaaaagttgttttggtccccaggaaaggaggggattagttttggaaagggactgttatcatctttgttttaaaatcaaactatatactaatttcctcccatagttatcttggcctgtactcaggaatgagcaaggacagttaatttgtgaggttagaagcaagatggagtcagctatgtcagatttctctcactgtcatgatttttgcaaaggcagtcaaatctacattctcacagtattaccttgccccagtaccagccatttattttcctgcaaggaaattaaggagaattccatataattagaaacaaaactatataaaaatataaatacaggctcttgaagttttgcctgaaatgctgttttgactcatgggtcaaaatttggttttacttcacatattattggtagaatcattgttttaattacagatgaaactaatgtagaagtcctgtttctcagaagcctttggataaactcaaatttctatgatataaacattcaagctaccccaaatcaattaagaatgttataaaataaaaatataaccaatgcctaatccaattgaatcctattaaatttttaaattaatatctagaaaataatttagtttttatactttacagccattttcagaacaagtaaaaactgtatttatagaaacattatttcatataaagagtggtggaaaaaagaaagttttcctatttaaatgagtttaagaaatgctaggtgcaaaggaaggttagcacctaccgtaatgtgttttgaatataaaataaaaggatcagagtctcacagtcatcaactcttcatcctccttgtcaccacccaacttattttcttggagcattttaaggactaatattcctgaaaaatgctatctaaatccaaataggaagaatttcaatattcaggatattttctttgagcatccaaagggactgtaaaaattaaatatacagaatgaaaccaatcagtttagcaatgcattattattatgtctatttctctgctcattattgcccctttgttgaatatcaagatgcccagaagtaaaaataaattgtatcattgagagaaatagatgcactgaatgagtggtttttaattatcatggtcactttttggatttggggtgattttggcagtaccctcagtactgattatgttttaaattattgcttttccttgaggaatctgccctatgactcaagaaaaagaaatcttcctaggaagaaacactatgcagtaaatacaacctatacttgtgcacctcttcataaaccttcccatactcccaactatttgggagataatggcttcagaaacactggaaaggcaaagcaatctatctccggacagctaatatcttcattcagataagaaagaaaccattagatttgagggttttgctatccccaataatctgatgaattaaattatctgactgaatgtttctgataattattcaactcctctcctcatgtataagttcttggctgaagaaaagttctaaaaatgatttaagacctagctgtacccttcccagtcatctgctacaaacccagactttgagcacccctcctctctttcccatctctcccactcatttagcccttagcatatgcaacgttttatcatttgtttttgctttagagcacacacagacctaaaaagtcaggtggtagaatgaaaagaagatgagcttaggaaataaacagggcccagtttaaaatggcctttaagtaaatgacatacttaactcatttgagccttggtttgtttgtaaaatgtagataaattaaaacagccagggttcttgtggctgaaagtaataggatgctattatttaatggcttaaagatttaagcagtgtattccctcacacagcaaggcacccaggagcagagtggttgaggattggttaaatcaggaattcattaatatcatggaagacccaggtggtttctgtctttttggtctccttatggtttcaagatgactgtgtaccctaagcattacctccctgtgaaccaagatccacaaaggacatggcgaaagttcttgtgacccttctaagagtgaagaaaatgttcctagaggttccctgacagccccccacctccatcccctcaatctggtaggcattctttatgccatgttatatatagctcagagtcacaccacacatcaatgcccacagtaattgctaacatgggccacagaactaccatgactgactgagaagaatcaagatttaccccaaggctgcagagaagaccctgaagcatatcagaacctagataaaatattttactggcaaggaaaaagagaaagaagagacagaaagggcaaccagaagtgtaagaatgggaagaaatttatgtttgcctccctacctggatggtaagggtaaaggaatatgtctcatatcactttcatatccccagtaaccagtattttgcctcccacagaaaatgttttggggaatatgtacaaacacataatggtgaagctcctataatcagtaaagtatatacttgaagtcattttcttaagagtggaaatgactttaggctcttacatagacactttgtctcctaagccatctcatggcaactgctctgtgttcaagaaagcaccatggtttcactggggcagcaggcagataccatgtaattgagaaatcagatcaaacagatgcatctagagagggtcaagacaaataatacattctctgcattttggacagtttcctcaggtgtagccatgagattatatgccctgaatggctgtcatagcattgaaagcaaggaaatgtagtcctcatctccatctgttgaaggggacaataactattgaagaaggccactgaattaacaaatatatcacattctggaaccttcttaccctggaggttgaagggaagacaataatgataaatatgaaaacaggcaattaatcatcagccactgcaagatgaaaaattcttcagaagtttgtgttaatggaggaattgctatttttgatcttctggttttttctatccctggatgccttgggtaatctgagacaaagctcaagggaatgtaaccagccacccaaaatgaatgcactcaagtgagaagttgcagagctgtgacttggggcagtattatgaattactctgagaaggagcttcagctcccaagttcaatcatggacttggaatgtattccagaggatgttcagagccagggagagatgatgtcaaatactagtttcagaaataccaaaggttgaatgactcatgacctatcactaatctcaaccttcagcgatccgctagccccagaagctatatttattcaatatattcaaatggaaatataatgggtagatgagatgtaataatgagttaagaattttagggaacaaaaataaatcagctttgaggcttaaggcagaaaagagagtaacagagaatatgaatacatgtgtttgaaaaatatttccataaatgaagtaaaacatacagggaacctaatatgcattccaaggaataggataattatggataaatgtgggttttctcaaagtatgctttctttgggagggttccatttctaataaaaagtattcattttaagaatgaacaatgagtttaccttggagggattctgttggtcttaggtggacaataaactctttctcttttttattcttcagtttttttccccacattcctttgcatctcacaaacccaacctcatgccttaccatggttttcaaaacattaactgatcaacattcaaaaaatacatcaaattccttctcattgttctttgattaaaaatattcacaagaaaatctaaggaaatgtttctcaaaactttgaacctcttattacagaatgctctagtgtctgttaggtatttatctactttgatacactgttaaatctgattaaattcttcacactatccttactaaagttagtaacattcaactagtattaatgaaattgattcagaaattgtacaatatgtaattgtgttgatatagtcagtgatgtgcgtaaacaattctctaaacagtacacacaaaaatctgctctattctttaataccggtgcaattttctgcaggagcaagcattttaaattaaataacctgataatatttgaattattcacttcctttagctatagtagctcctctttaagtttagaaataacatataaatgtttgtcttttcccctttactcccactgtccccttgtccctaatgcagaaaagacctttgtaaatctttgccatgacaatgtactttgaaaaggcaattaggaatggcaatttgattatccagcatcaggaagtttctagatcattttgtcagcatttctgcttttccaaatgcatctttgtgttgaaaacatcccatttttccagtagagaaaagttattatgcagacccacttaatcagcctttcagtgcatttaccagggctctatagaactcaaaaatgtcatccttttgttatgctggtggttgagtattatgacatgcatataaaaataaaattaagctagtaggcttaatcccattttctttgtcctgtgtgtctccacggggcacatcttgtccatgtcaaagtcattttaacagtttgcatcaatatgccatcttttaactggctatttaaaaaaatgatggtaggccaaatgtggtggtttatacctgtaatctcagcacttcctgaggcagaggcaggaggatcggttgagcccaggagtttgagaccaacctgggcaacataaggagactctgtctctaaacaaaatacaaaaattagttgagcatgctcgtgcacatctgtggtcccagttacttaggaggcttaggaaggaggatgacttgagcctagggggttgaagcttcagtgagctatgatcacaccactgcactctagcctcggtgacagagtgagatcccatttcaaagaaaaacttttaaaaaaatgattggggcttatagaatataaatcaaagaaaatatttaatagggaaaaccaaagacttcaatttgtgtgttgctaatgggcctgttgcaagagctatttattattactctttcaaaaatagtttatcctgaaattagtgacttccactgacttaagtaaaataggagcttttggcttccatgccctgtgtattataatcaaggccctcagacctttcaggtgccttcattataacaattctcatcactttagtagggtatgttagttctattcacagaagtcccattctggtaaagtttatctttttcttccattgcttgtgtttttggtgttgtatctacaaaaccattgctgaatcaaggtcacaaaaatttactgctgtgttttcttctaaaggttttgtagttttagctcttatatttgtacacttgatccaatttgagtttagttctctatggtatgaggtaaggatccaagttcttctttttttatttttatgtggctatccagttgtcccaacactattgaaaagatggttctttctgcacttaattgtcttggcaattgttgaaagccagttgaccataaattgagggtttattttggaaatctcaattctatttccattaatctatatgtctgtctttatgccagtaccacatggtcttgattactgtagctttgttttaagttttgagaagtgtgattcctccatctttgttcttatttttcaagattgcttttggctgtttcaggttccttaacatttctatatgaactttggatcagtttgccaattttttccaaaaaatcctggtgagattttgataagaattgaatctttaggccaatggtggggagtagtgtcatcttagcaataccaagtcttctgctccatgaacatgagatgtatttccatttatttgggtcttctttagtttctttcaacaacattttgtaattattagagaataagttttgcgatcctttgtttaatttaaatttatttatttatttatttatttttgagacagagtctcactctgttgcccaggctggagtgcaatggcaccatctcggctcactgcaagctccgcctcccgggttcacaccattctcctgcctcagcctcctgagtagctgggactacaggcgcctgccaccacacccggctaattttttgtgtttttagcagagatggggtttcaccatgttagccaggatggtctcgatctcctgacctcgtgatccgctcgcctcagcctcccaaaatgctgggattataggcgtgagccactgtgcctggccttaaatttatttttttttaaagagcacttttaaaaacagaatgtttagcttttctcagcatttgtgcctttggcaaacatgtcagaggcagctgacttatataatagaacagtctcccaacaataaattctcatcaggaggcagtcagaattaaaagagtgagttttgatgctataatcctggatcttctacttcctagcattggaaacttgggcaaccgaactctgtgccattttattatgtgaaatgggtatttttttattaaatagttatgccacagagattttttgtgaagattaaatgtttagtatatatacagtccaaaaacctgtaattggcacatggtaaatagttaataaacatgcatcgttgttattgttacaatgccctatcttttcccaaagcactactacagattctatttgaaattgagccattaccttctggtatgttgaggcagaagaaaggcaaagaataactgctgcagctcttagactctttgttttcctgttattgaggagcctttctaagaaagcaccacggtcatccttgcttcatgggaatctggggtttgttttgttggtgttttatagctggccaactggctggaaactcctctgttgagatgtatcgccaagtgctcctgtctggttgtcgctgtgtggagctggactgctggaagggacggactgcagaagaggaacctgtcatcacccatggcttcaccatgacaactgaaatatctttcaaggtagagtatatgaatgttactaagagaggcagctggagacacctgattccttttggttaaagcctcctaaggtagaaagtcccagtggtcacaattaagtccaaaggctgttaatcatctttgcaatttcagaggctaaaatttggctgtttattcatgaataattggcatcaggtgaattaattcatgctaaccaaattctaaggaaactgtctcgtgaaaggaaatatcaaggtatttgtcttgtcctctttagcactcttactcctaatttcttgcattttatttttgtgaaatatccataaagaatacagacaacttatttctatgctttaactaatggctataaagtatgcatccatgtaactaccatctaaatcgagaaatagaaacttggggagtacctgaaacacttccatgtatccattcccatcagaatgtcccgtttaccctcagaggtgactaccatcctgactattacagtggtccctactttgcgcttctttagagcacaaagtacaaatttatatgcagccctaaatgatgtagcttcaccaatttttttcacttgtaaattgattcacactatagtatacattattttatgacttgcttttttcactccacattgtttagaaggttcattaatattgtttcagataactctagatttgttggctttctttatcatgatgatagtattaattattactgttaattattatgtaagattccattctgtgatgctatcttttggaatgttgacgtctatcagtcaaagacccctaggaacatacctatggtcaagttgggtttgtttgctcatacaacaaaggagaacacatgttgtagggagctggagtgtctcagtaaaagtttattagagaggacttacaggacttgggcttatagtaggtgatttgggggacggttcaaaggagaagggttttgcagtggattgggtgctgtcaggaggcacaaacaatcctatgagagggtatcttagtaaatcctatctaggaagcaggactaaagctgttactgataaagatgcatcagccattcttgttagtgagaaatgaggtgcatttggtctctctctttttccacccttagctctattttgcaccacaaggggccacacattcatgtgtatggacacccaagcccaaatatctaaagtctgtccacatgtcctgcaaagagccttccccagggggtaggggccattggagtaggggaaatctggggtcctaggtacttggagagtgactggagaaagaagttgtgggcttcagggaacatgttctctccgctgactccggctttctcacccctttaaatgggaatcagaagagaagggccagaggacaacctctcgcactaggtcccaaggcataagccctgttgcctgggatacctgggtctcagggaagtgtcactaactcttatctgaagcaaccaaggaaacagagtccaagtaagtaattaaggtgagtggagacaaggccattgaacatgggagatcagagtactgagaagcaagaatatgggatgaattcaatgttaatatcaccaaggttagtgacgaagctttggatgaagaaactgtgtgccacttgccaactcttttctgaataagggtggctcagtagatggcagaagtgaagaagaggtaaaaactcttttggctgcctcatgggaactaggatttttttttaaagaagattgaaaggtagtgttttagaagtagcattgagagcaaaaagatcccaaaccccagcttcttaatgtgaaacacttgagatgtgagaaaataaacagtgatcactgaagaaagcagctaacaagaagcaagattttcaagggacagccaagtttctgtttagacaaaaggatttttctgattgaagttgctgtattagacaataataaaaatgttttcagcagtaatatcattcacacctaaaaatatgtgtattatgttgtgcctaaggaatacgacttttcatttatgcaacttagcctacaatgcaataattagagaaaatagcacccttcacttaaattttacaacaaagtttaatacagggttgacattaattctgatcaaaatctttaaaagctgtgtctgttcctgaaattgagcatgattatgacccttgcattttcttaagtggaaaatcaatgtttaattcatttccatagtcccacttcttccctctcagaccttgctatggtcctttgtcaactacctaagatgcagtctaacagttgggctctttaagaaaaagtggagacaggttacccccatgtggaaccagtgcagcttgggctcatctgtctgttgatggatgatgatgctcctggaatggcagacagcacgccctgatggagctgagagctggtggcaccgcacactgcccatccgccaggaagacctgccccactccctccccaggccactgccctgtctaccctccagagacattgtgagaagcaattgttattttcttaataatttaaaatcctccaagttctctgagttccttgtgggagaataaacaccaagcacatcctaaggcatatttattttatgtggagcatttgcttcttggcctctgcctgccattgagtcaacttggagtgactctccttgtgcactcgatcatagaagtggttcttcaattacatctgtaatcccagagtcacgggctgattgaacatctctttctgggctctggaagcatggcttctcaaccacgtccatacacttgccagtgggtgagaggcttaaagactaaaatctaacccagaatgctgctttctctctctgcctgctggagttgggagtggggaggtgaccaggatggctaaagacaggagtgaattcatcatcccagttggtttttccagctattcctcctgctaatgcacatagcaggatagacagttctggctgagatgtggggaggtgaccaggttggctaaagacaggagtgaattcatcatcccagttggtttttccagctattcctcctgctaatgcacatagcaggatagacagttctggctgagatgtgggtaggtgacagtgggtgaggatggatgtggggagtggaaatgccaacctattttgcagactgatatgcagtagcaaggatgctttgcatcaggactgagactaggaaagacaagtaagtctcctagcaagtaaaatttaaggacgtctttgctctcagggctgtgtaagcacagagctggcactagagagtgagtgtctctttaaattttgcacatagtcgcctctcttgcctcatcctagtcccaacactgcttgcatgattatcagcatgcagtctgctttccctgaacccagcgtgtaaagtgactttgtaataagaaagagtaagaagagaaacagggcacaaggccctacataatctgcaatcccattaccttgtttcttactgctttccccctcatccactgggctccaacagtactgaccttgctgttcatgggctgtgccaggctggccccgcctcacagcctttgcacaggctcttccctctgcctggaatggtattctcataggtatctgcctggttcttcccttgcctccttgaagccttcctcaaatgtcaccttctcagtgaggcctcctgggacccatctatttaatactgtcaccagccaccactcccaatccccacactactgacgtaacccctgacacccccactttttagtaatgtattttcctaaggcacttatcatatcaccttccaacaatctgcctaatttgcttaattcctatgttccttgtttattgtcccttctactaacgcataagctccacaaagacagggctctttgttctgttccctgatctgtcccaagttctcttctttgagcagaacctgacatatagtagatgctcaataaatgtttttgaatgaattttcccttcccagagcaagtagatcaaatacagcataacctccattttcagtctttcttgcctctgctcatcagataagtgaatttgtctttctccatcctacacataatatgttggtagaggcagggaaaacattcccccaacatttgccagttttagctgccctgaacatttgggccagatattcacagtataattagactatattctatagctacactgcatagtgcagcagcaaaataaactgattgcagagttcatttttatgtcacccagtgtatctgctttcagtatgtgtgacctggaaagcttctgtgtgatagatcccaaaagcaagagatcctattggcatttgctccctgtttactgtatgggtcaaaataaaaagttacgttctgggaaaggagacattcagctcctttatgaagggctttttgttttgtagtctggctttattatttatcccatatatctgtttcaatgcctcatcaccttagccttcctggtggccatgacatagcaattcaccacttagttttttcattctctcttctcccacccaatatcctttctccttacgcttgacaccacctacccacctccttcccagggtggtttttctccctttaggcagcttccttttaaccagcaattatataagatggaaaactggataatgtaataaaatatatgaggaaaacatattaaattagagtaggttaaatccagcatttctgaaaataaagtgtcattcattccctgagaaaaacaataatttaggatgcagtttcactgctacctaaatgcacatataaaatggatatccaaatacaccctactgttgtctgtcgaggataaaggatttcaaggccagtttgtctcactggagtttagtaattgaaccatatggcttatagattattgaatctagtgttacaagtctctgaaaaacaattttggcttgataaagagcaatggagcattaccgtactttcacatccaatgtccaccaattacagcaagtatgaaagaatgtaacttaaaagctataactggttttctcatcctaactgatcacgcacaccatacaaaatatttcaaaggcacaaaagcatgaaagttctccagtggaacttctgaagttttcagttgctcccaactaaaattattagatgaaatttagtaattttttttgctttaataattggaaaattttcctaagctgctagctaaagttatggtagagatggggagaggtggacagagagaggagggagaaggatgggtgagaaagagagaaaggtgaacacagaaggtaaggatgctactctggagatgactgccaggggtccagtacaagctcttccatttagtcactgcaagaccttggagaagcttccttcccagtgcaagtctcctttgttatcagcaaactggagatgataatagtgcttacctcctagggtggttgtaagtaagcattcaataaccctacttaatacacaaatattgcttaaactatgcatggcatgcagtgcctactctataaatgttagctttggatgttatcattgaaattcataaaagccaaatgttagctttctttctgtaaatataatggttgtgtgttacataggcatggacttattaagccagagtgaaggtggggggctaaattaagtcatctgtaaggctaacatggtagaaggtgtgggcatcctctacgctcaacccatggcatccacttcacctccaggaaggtaccagaagcccaaattgtagtaaactaaacacagcccaggccttggttaggggcccagtaggagcagagaagggaacagcagatgagcttggatgctccactgcaaacatgagtcctaagccaagcacacaagatcagaagtacacaatgtcagaggcaggacaaatggaaaagcaggggaaacaacacaggaagatctaggaaccccagtggcccagctgtagttcagaccacactagcatccccactgtgggaagagagaatgaaacccagggagccaggaagatggggggcatggactccctacaagtctaagaggcccagagaaacactcacattttatcaaccaaaggaagatacgagagagatttgacctggagctaaatacccacttcctaaattagaggaggggaggaggggtcttacccaccttcagatttgactctccttggccgaaataccaatgaggtgagcctacaatccactttcattattaaaggcagctggagaagttctcaaacagacaatgaagacagccatcatcagaaaagttagcaaagatggccaggcgcagtggctcatgcctataatcccagcactttgggaggctgaagcaggcagataacttgaggtcagaagttcgaaaccagcctggtcaacatggcaaaaccccatctctactaaaaatacaaaaaattgtctgggtgtggtggtacatgcctgtagtcccagctgcctgggagctgaggcacaagaatcgcccaaaccaaggaggcagaggttacagtgagccaagatcatgctacagcactccagcctgggcaacagagcaagacttcgtttcaaaaaaaaaaaaagaaaagaaaagttagcaaagactaattacacttttatttacatgtgtatttgcaggacttttgtaatgtttattggaaatttcagccatgaagttgttaaaaagttaatctggctattaagtatgaatcaacattcaatcttctgtaatacaaaattacatttatctttggttacaatcaagttttaagctttgcttaagccaatgatcagactagtccaagggtcaacaaactatcttctgcagaccacatttatcctgtcatctgcttttgtgaattaagctttattgggacacagccacatccaattgtttacatattatctgtggctgctttggggctatgcattagtctggactgtctctatctctagagagacagagttattaaaaggaactggcttatgtggttatggaggctgagaaatcccaagatctgcagttggcaagctggagacccagctgacctaatggcacaatatcagtcccaatccaaaggcctaagaataaggagagctaatggtgtaagctgcagtccaagtccaagtctcaaggtaggagaagaccaatgtcccagctcaaaaacagtcaggcagaaacagcaaattctcctttactctttttttttttttcctattcaggcttccagtgcgttgaatgaggcccatccacattagggagggcaggctgcttaactcggtctaccaattcaaatgttaatctcatccagaaacccctcacagagacacccagaagaatgtttaacgaaatatctgggcaccccatgacccagtcaagttgacacataaaattaatcatcacgagctacaaaggcagagttgaacagttgccatagaaatagaaactatatggccagcaaagcctaaaatgctacctggtcctttatgaaaaaatgtatgctgacctctgagctagtcaatagaagaataaatgggaacacaactagataaattctgtttctcttctgtcatatattaggagttcattcattcatttgaaagtatttcctgagcatctagaatgtgccttagcagaacagtgaagaaaacaagttcttacctcaagaagtttacactgtctagtgaggaaagatagatcaaaataaacacaaagatacggtacatagaaacatgccctttaaagcaatctaaatcagtgggcaaggaaaagagagacctgaattatgctgtctggatggtagaggcaggcctttggtaaggtgatgtttaggcacaggtgctgtacttactcccaaatcaatgcagtaaatcatgctttaatgtgagtatttttgactgaaggaacaaagtgcaaagatggtgagatgaaagcatgcttgatgtattcaaggaaaagcaacaagatcaatggactgtatccaggtgacagagagggagaggaaaaagagatgtatttaaagaaatggcaggtgccagatcaagttaggctgtgtagattatgataatgaatttggatttcattccatgtgaaatgggaggtcattggaaagtttatagaaaggagcgaaactgtctactcatgtttaggagcaatgactctggctatggtgtggaatacagcggcaagtactagaagccaggaaagcaataaaaagactgtcagtcagcttctcctaggttttgctgcaataagaagaaaccctaggatcacagtgatttacaaccacaacggtttacttctcacacaggttagatgtcagctgttgctctgattgctattgtttggaattcatgttgaaagaacaacccacatctatgatatcactggactcatgggagaagagaaagagaaatggctggacaacaacatgatgggtctttaagactctactcagcagcagcacatgtcattttcatacacaggcccttggccaaaataaaaccacggccaagcctatggtcaacagggtgtgtagacagaattctcccaaaggaagggggaagcaaatacgtgggaatggtgataaaatctaccacagcagtcactgcagtggtttttgtatcaggatgatagcagtggaggtgctgacacttgactgtactcgggacctattttggacaagattgctgatgaattgaaaggtgtgagagaaggagaggaggcgagaatggctctactgtatttatcctttacctgatacactagtgccaaatttatgaaataaacaaaatccagccctttttttccacacttagcatccacatccttgatgacctctattctcagttcttttgagggctttgctcttagctggctaagattattagctgcatggaagttactgcaatggttgggtattaataagctctagagtcagacaaatcttcctggggtttaatcttggattctcttctctatgacttaaggtaagtcagttaatatctctgcaccttagttgaatcaagaatagataaccatcatgagctgagtcctttgccttctcttgctgcatcttcacaacagatctgtgaagtgaggtttattgcactttatagattagcaaaccaatacacagaggcattaagtgattttcccaaggtcacacagcttgcaaatctcagaggcaaggattcaaaagtcggtttgaatccaaagcctatactcaaataaatcaaatatagcatttaaaatctggatgttgcttgccttttatagtgcttgctttttttgacagactcaactatcgtaaaagttaaactgattatgtatgaaagataatctgtgagttcatttctaagaaacagtaaaagtgattcttctcgctccatgcaggcaaatccttcttagaggatatatgcaaatgtagtacagaattagaaagccttacttatactctggggccagggaaatagctttcaggagtggatataaagaacgctatatattgaatggggaaggtagagacgatagcagaaaaggctcaggcataaagaataggagtggaaatccctatttaaaaggagaatatgaaaaaaataaatgtaactaaaaacaagtgtatgggaatatgcaacctcactactactgaaagtgatataattaaacaataaatgagactgcactttactaccagttaaataagaaaaacatttttaagaataatgcccaaaactggtgaatatgcattgaaatctggtcctgcatgcattactctgggcaatctaaagtgaaaagtaatttgaaatacatgagggactgtaagagtattcatattcttaaatcaagaattccccttctgagaattcattcccagaaaatcaatcaagatattagggaaaaaatgaagctgttctctgtagaattatttgaatgacagctctgaaaatgtagctgtccaacagttggggaatggttaaatcaattttaatacctttactttctagaattttgtacatatattgaaacttgtgacatatacatttttaaaaatgcagattgaaaattgaagtactgatacatgttacaacatggatgaactttgaaaccatgctaagtgaaaggtggtcggcacaaacaaccatatattgtatggttacatttatatgaaataattagaataggcaaatctatgaatacataaagtgatgaatgattgcctgggactaggtgtgtggggtggggtgcaggaatgaggagtgactgctagtgggtacatggtttctttttgaggcgataaaaatgttctaacttatattgggatggtgctcgcatgactctctgaatatactaaaaaccattgaactgtacactttcaatgggcagattatatctcaaaaaagtcacatctcaataacaaagctttttaaaaatacaagttgagtatatactgtaattaaaactaagctacataaatacatgagagacagactagaagtgaatataatgaaatgctaacaatggtttggttcagaaagtggatttgtgggtgaaaatttttgccttctcttactgtcccaaatgtttataatatgattagatttctttgattattaaaaaatagatacaattagcaaacaggagaatcctctcctttgcatttctctctcccctccaccaaaatccaatcttcttataactttccagaatcaagagtcagaattagcaccgtccagcagccctcaaaatcccttctagccatttcaggccattcgatacaattctctgaatggaaaagacaactatattaatagatttaatacctttcaagaatatacagatgaaaaattctggcatactgaatatacatgtgttctcatttttaggaagtgatagaagcaattgcggagtgtgcatttaagacttcaccttttccaattctcctttcgtttgagaaccatgtggattcgtaagtattcaacacattcaggaatgagtctttttcccgaatagggcatactgagtaattgtttatcagatttaagattatttgacatgattaatggtgttcttcaatcatgttgtatattaactggcatgttttcatttgtaggtgatggaattcacttaaaataatcaacattaaaattatccgttggacttgtaggatctattttcataccatagtatggtttttaaattaaaaactcttctttttgcaatgcagtggaacacatttttctacacaatacatgtctctgttatagatttggggtgctgtgggccacttttataacccttcttcattagctccttctattgcacacaatttgagtccacttcatcactttgtggcaggtggggggagagctgtgaattccattttaccaatttgcacttacacagaactcagttcagcaaatctccatattcccccttttcactggctttcccctgtttgttaatatttgtatttgccaatttcaaaatagcctgcatgtattgctgagctacacaaagaaaaggttattttgacttcactgttttatattcattttatcacacattaccaaagagagacacatttatatctaatagatgtatattagtttatcatgtagttactttaaagagcttcagaatgaaagattcttatccatattgaatgaaagcctctctttcatttcaggaacctaagccagatttttcaactaaaagccagcagcacctgtcctaatttggattacgagtttctttttaccctccttcctattgggagtctttcccaggtcactgagcctctttgtccaagtaatttgtaacatgtgcttcaattctctaattcttaaagagttcactagatcttaaagatgcagattggtcatgggcaaatttcaacttgaagaatttctaagtagttaaatgtgacaattttataattatctgtattttttcagtttgcccgccagaaatccatattatatttaccggcttgtggttctgcttcattatgcaacaatcatccaatgaatgatgtaatcctttggcacatagtttctccaacgcttctgagggtcaaaggaagagaaaggaatttattctgttccatgctatttctgttcttactcaaaggggcatctctagaagcagtatttaatacctagtttgctttgcaactaggttctgctttgcaattgactctgttaaacaatttctcatctctgtcaattcatttataattggcctgtaacaatacgtatgagtccattcttgtactgctataaagaaatgcctgggtaagagactgggtaatttatgaagaaaagaggtttaattggctcacagttccacaggctgtacaggaagcatggtggcatctgctcctggggagtcctcagagagctttttactcacgggaagacagagtgggagcaggtgtcttacatggcaggaggagaactaagagagagtggggaggtgtcacacacttttaaacaaccagatctcatgagaactcactatcgcaacaacagtaccaaggggaatggtgttacaccataagaaatctcccccatgatccaatcacctcccaccaggccccacttccaacatcgggggttacaatttgacatgagatttgggcagggatgcagattcaaaccatatcacaatacttgagcacttttctttcaggtattatagtttcgacttgaggatgctttttttttttttttttttttttttttctgaagcggagtttcactcttgttgcccaggctggagtgccatggcacaatcctggttcactgcaacctccatctcccgagttcaagcaattctcctgcctcagccttccgagtagctgggattacaggcatgcaccaccatgctcagctaattttgtatttttagtagacacggggattctccatgttggtcaggctagtctcgaactcccgacctcaggtgatccgcccacctcggcctcccaaagtgctgggattggcatacttatgttcttaaagagaagtttctatttaaattagacaaaatgaaaggctatggttccattctatattgtcacacctgctacactgagcttccccttggcatagccagaaaaatatcaaccgccaccaccaccaccaacataatagctaacctttattaatagcgaacatttattaaacattttttgtgccaagcagtttttgaaatattttacatgcctcagctcatgtaagccttaccacaaacccaggtgcttctaagagtaaatattatgattatcgccattttacagatgatggaactgagtcctaaagaggatgaataacttgctcaaggccatgtaactaaaacatgacagagatgggattccaatccagttagtgtggcttcaaaatgcacacttttaaccaacacatctcctacgcctaaacagaagcatcaggagccttcaaaacatcaaattcagacaacgagagcatccaccaggcaatggccagcaaatgtttgcctctgtggcttgtaacccttaaacacaagatgtgttttgcagttcttcacactagtcatttagagatcaaaaactggacatgaaaactaatttctgcactgtgcctaaaggcaaagagactagtgccattgtactgcccttatgggcttaaaaatgataaatttagctattaaaagttcattaataatttctatgtgacaaaagaaaacaggaaaacagcctttccaggatgccatgattgtgtcccaagccactgagataatgtaatggcagtgaaatactaaaagataaaattctattgtggaggaagtgggtgggagttgcttgcttcatatttcccttgtccttcagatatcaaaattgttcagccaccattctttcctgggaggctagcacacacccaaagaaaaccgataagctttcccttcgctggtaaaaccccgtgcttgacttgtgagccacttcatctagttcctgagcccatggtaggcagtagcagcactctttcccactaaccctagaaataacctcagaatccttctcaacacagtgacctcagactagaccagcaagacatctgacacctatttgccatctctgatgaactattttatttccctgtgtgctgcatgtatggaatttcagattcagaactctggtcccagctcacttgggccacacgtccaaaacaaatttatactagaaaaaaggagaaaaggacagggcacggtggctcacgcctgtaatcccagcactttgggaggccgagactggtggatcatgaggtcaggagatcgagaccatcctggccaacattgtgaaatccagtctctactacaaatacaaaacaggtgttatggcgggtgcctacagtcccagttactcaggaggctgaggcaggagaatcgcttgaacctgggaggcagaggctgcagtgagctgagatcacgccactgcactccagcctgggtgacagagtgagactttgtctcaaaaaaactaaattaattaaaaaagaaagaaaaaatgagaaaagccactgaaacttctggttttctctcccaatatctgaagtcacctatccatagacaataaaagggaatctgctattagctgctttcaatgtatcctgttgctacatcagaatcccatgaagtgtcttcaaaatgcagattcctgagctacacccttaccctgactgagaatttctagaaataagacttgaaaatatatttttaaaagccctacttgactctgacatcctacttgtgaactaacacttttataaaaagaattctacaccaaattcaatggaagtaatctttacccatgttcagccacagaaagctgtgaaattttgaacaaggttcttaatttccatggattgcagattcctcctttatagggaaagaggttggtttagttcaaactggaggatttgctcccaagaaatcaagtgagttcctcggtcagaaaaactgacctctgccccagacgctcacaccttgggagtattttattatgctcagaaatgtctgctatgacctgaagctcaaaatgcatttgtgattttttttccctctcactttgtccccatggtagctgatattgatgctctaaacacttcaggattttgttttttgctaattgcaattttaatgccttttatttctgcagttctgacctgcaattaaagttggtttgttttcctctgactttttcaattcaatttgctctctgctctgatttagttccatcaggtgggtgtgcatgtttattgagaacatgaatagcctgattaccaaatagctcattttactttttgctaggacacctacctcttgttctgtccatctcagttgattctgaggcaggttttgtttttgtttttgtttgtttgtttggtttgagggtctcactctgtcacccaggcaggagtgcagtggtgcaatctcggcttactgcaacctccacctcccagattcaagcgattctcctgcctcctaagtagctggtattacaggcacgcaccaccacaactggcaaacttttgcatttttagtagagacaggatttcaccatgttggccaggccgatctcgaactcctgacctcaggtgatctgcctgcctcggcatcccaaagggctgggattacagacgtgagccaccatacccagccctcaggcaggttctaaacgtctacattagacatagattcttgttcttaaaagtgtggtcctcagaccagcagcatctgcatcactggagagcaagttagagctgcagctgagtcctgtaccccaccctggactctgtgttggactcttcattttaataagaccccaggtaacgtgaatgaaatagaagagctaagctgtaaccaccatggtttattaaccacctgcatcagaattatctgcagtctggcttaaaatgcatgttccggggctttggtcccagctacatgaatcaggggactgtggacttgatcctgtcacctgcagcattaacagctcaggtgattccttagtggaattgagtgataatcatggctccagtaaaatctttatctgggcctgatttggggacttcctgacagaggacacctgtttggggatatttgggacatctcccttaaattcctctaatggaaagaatatggttccctggaaaatcctgagagcagggcattcaggtaaaatgccctgctttcactccaggtgtttgatcaaagataattcggggctcccaatttccaacagtcaggaaaaatgtcatctactttggcacatgctgacttaccttaatcaatcgcagtggttttcaagcttgaacacacaccagaatcaagagggcttgttatgatgcagactcctggactccactgtcccggagtctctgattcagaatctgcatttctaacaagctcctggtgtgattctgctgatggttcaggggccacacttggagaagtaaagctccatgatactgagtagcatctttctgtgaaagggaaatggagggtttggccatttctttagtgcactctggaacatgtcgtcccagcacaactgtacttcttatcagcagcagccacagagcaggctgacctggtagaacccctgtgcaagttatcactggaggaagaagacttgaacccagggatgcccggggctggccctaccaaatcagccacttctctgcctgctcccaaaggtctcatagacacagtttctaatgacttgtccttcagcaacgacctccaatgcttttcaggatcaattctctgattagcagtttttcttctctccctaatactgctgaggaatgtggcagtgtattctgatggccgcataagccatttagtaagctcccatacagaccaagagaggcctggtgagaaggggcacggttgctgtggaggactttgcaaatcctttgaatctctccttagcctctccctgcagttccaagaaagcagtgactttggggtttcatattcaaatgccagagaactcactttccacccaaagcacacacttggttttttaaaaagaaaaaaatgaatacaaaatagtgacttttcctgtggaccatttcaatatgatttgaaccgtcaataccaaccccctaaccccagtaaaaaaaaaaaaagcccatgatccaggcttaaacattcatggaaaagggaatgaaaataagaataagaatcacattttatgatcaatttgaattttcgtcaagaaggattttcatcgctgttacttattcttagtacagtcacagtcctgctaaaatgtattatcattgcagcatgtagagataactattggaaatcaagttcgacagactgtagatcaaattcaaaatccataaaacccaaaggaactggataactttgtaatgatatttaacattccacgaaatgagaaaaaaaattattgctttttgaaaggtcaagggaagcagtagcattgaaacaatatgaatgttcccctatatcagctgtgtttacaagttactgggcgtaggatttgtctagtctagctggcggacgccgccttgtaacagtggaatcatcttacatttgccctgctcttttaatgtttcaaaggcgtttgcatccattacttcatttcatcttctcagcaccctctgtccctttccaagaacggttattattctcctcattttatagacccagagtggttcagaccctgtcgctcagctcagcaaaccctgcagtgccagcctttttccattataccaggtccctactggcaatatattcagaatgataccacctttgctattctgttatgtatatatgagttgcacacacctttccccaaggtgcctgctacttttatctttcctccaggaccccctccccaagtggacacactgtttgcctgtctgcccttttctacattttgagattctctccctctctttttctctctccgttgtctctctttccctattcagctccctccctgccatccttccttatctatcctctttcatctcctcataaacactcctttgcagcagtggtttacaaatttcacttgataatttacatggaaatatgaaagggttctttctccaagtgtcttgcaattgacttggaatcagcgagttaaacaaaagggactgagcctctaactctgggaatttcaaggctccagttacagcaaatgacatgctgtcccctccacctatgtctatgcaggtctgccttgggaaccacctcacacatcagtgccttcgctgtccatctgtgtatgttattcaaattcacataagttaagataaagatccaggatgataaaaaccaatcctgatgggtgggattagagaattacttctttctgtagttaataacacaaagcaatcctgttcaggttctttggataagcctccctactttccttcttctgttcttgttctcccttagcccaaagcagcaagccaagatggcggagtactgccgactgatctttggggatgcccttctcatggagcccctggaaaaatatccagtaagcagttctgatgtttgtccttgaaggaatgtatgcattattgatgaatgaggttgagggaaaacttacttccttttcatatttatgtttcttggtaagattaatgcagttggtgatgaaatctttgacaaggaggataccagcaatgggccccactaagggtagaggaatgcctctgcactcttcctcttcccacactcttctctctcgctggctgcctgatgaaactcaatcaagagtgcagatttcccaacaattacaatcagcccatagagacagtccaagaggacaggcctctgctcactcccagggaacctcgtcacacctctttgagatgaatggattggcaaaacaggacactgcaggtggcacaatgtcttcttggcctgtccctgctggctgttctctatttccttggatgcaccttttggtgtggcacaactcaggtcgcccattgcattgatgatatctctgctttgggaaggaaagcagcagaaatatcctaaagtagcattttccttcccgcacccttttgcccaatctccatgcatttgtaagtgagtttataccagtccctccgctcattgcaagccaagaatagaggactaacttaggcattctatagattttcttaaagtaacctatcttgtggcttgcacacatgctctctgatacaatatctaatgaccccctcatgggaaattgattttcccgttagatgtacaaacttgaaacagtcaaaataaggcttgcaaatgtggtagcttgaatcttagggctgggaggaaatctgaagccacctcatccacttctgttgatgccagggacgtgcagctaaactacctagtaccaggatggggattttgctgattttaaggggcatctgaaaaaatgatttcatgggctcacctggaagcttctgcccgtctttaccaactcctcctggcagatgcctggcttccctccttcaaaaattcaggccagggccttcttatctgtcctaaatcaagatgattgggtttctatgttccattggaaaattcataaatgttcagatttagtacatcaaatctaccagtacatttctatggtcttcttcatgtagaatatgttgaaaaaaaaagtatagtaatgaaaatatatctttgatataaaaaaaaattagctcccatgtaagatacactaagagtttaatgagcagtgttgaaggtagggaagaagtctagacatttggtatccacagctgatctgggggtctggggaggggatctgaaagagggagcagtatttttaaagaatatgcctttcatttctattagctggaatctggagttcctcttccaagccctatggatttaatgtataaaattttggtgaaaaataagaagaaatcacacaagtcatcagaaggaagcggcaaaaagaagctctcagaacaagcctccaacacctacagtgactcctccagcatgttcgagccctcatccccaggagccggtgaggggctggtgggctctccccgtcatgttttgtgttggtttaagaattgctgctctgggctgtgcgtggtggctcatgcctgtaatactactacttttggaggctgaggcaggtggattatgaggtcaggagttcgagaccatcctggccaacatggtgaaaccccgtgtctttggtggccaacatggtgaaatcctgtctcttgcaaaaatacaaaaattatctgggcatagtggcacgtacctgtagtcccagctactcgggaggctgaggcaggagaatcgcttgaacctaggaggcagatgttgcagtaagacaagatccagccactgcactccagcctggtgacagagtgagactccgtctcaaaaaaaaaagaatttgctgctctgaaattagcttagaaggactttgaacattcctatttctgcacagttttgaactactggttttctcttgctgctacaaacttagcggcttaaaccagcacaaatgtattatcctctagtcctgtaagtcaggaagccccctgggtttcactgggctacactccaggtgtcagccgggctgtgttccttcctggaggcgctaagggagaagctgtttccttgctttttccagcttctagaggccacccacattcgttggcttggggctccttccagcttcaaagccagcaaggctgcatttcactaacctttctcctgtggtcacatctccctctgaccacaggcaggaaatgtcctctgctggcaagaactcaagtcattacattggatccatccagataatccaggataattgctcccatgtcaaggtctttaactccatctcacctgcaatgtcccttttatcatgcaagctaacatattcatggagcagagacatctctgggaggtcattattctggctaccatgtaagccaaatagtcttcagagtgaccatatgactttaagcttcataatgggaaatattaactatagaactgagcactggatgcattgtcattgatgatatgctgaagagttctgggcatttcaattttttcatgttttaaagaactttttaaaatctgtgacatggcaaaattacttaaattatcttttgaagctcctagaggatgcctaatatcatttcttttccttttaaattaagggtgaaatagattgctgtggttgatgagaaaagaattcagtggcactcatttccttgggattatttgtcatttagtctgatttatcttccaagttcagtcagaagcttggcaatctgaaaatcgcattatagacatctcctgattgcagggtgattaagtggaagaaacttttaagcttgactgtaggaagtttttcagttataagttaaacataggaacaatcaattggaaaactacttagcagtgtctacaaaagctgaatatatgcactccctgtacctcgggagttccattcctaggtatatgcttgctaaagatgtgtatttaggtttaccaagagacacgtacaagaattgcttaaagcagaggtattcagaatagccaaatactggacaccaaatactcgtcaacagataaatgaattatggtatattcacacaaagaaagaatatgcagccatgagaataatctataactaaatgaaaactatggatgaatcactataaataaacataatattgagcaaaggaagtcaggtacacaaaaactacatactgtatgatttaacctatataacacacaaaaacaggcaaaactaatttatgctatttattagaagtcaggataatgggttcccttggaagaaaagcaaccagcagggagcccaagagccttctagagattggttatattttgtttcttgatctggatatcatttactcagacacgtttatttggtgaaaattctttgcactgtggacttacgacgtgtacttttctgtacgcctgttatacatcagttataagattttaaaataattaaaatataaactctaggacaatcagggttaaaaaaaagtagcctgagactctgatttatcttttcttctatttttctgtctcaattgcctgtttttttattgtttcgattaaaatctttatcaacagacgttatataattctttgaaagggttttgtcctgtagcttttgaatgtgtactttcatcattattgtgcatgtctttcaacattttttcaaaaataatttctgtactcagtaaaaatgttctctttgaagtttggaagtgagtatcattaacaggcctttcattcacacctatttcctaacacaactctatccgttgaatgatagcaagcaaaccttgtcttcctttgcatgtgggtgcttgtgttttttaccatctgcctttcccactaccagttctctgcctcttattaacaggatgcataacacaaatgacgatttttacaggcagtgaacattattgcttaatatagagaaagggcaacaatctgttagttattcagtagatttcctaagctagccctgttgtctattatgcaatcagtggaaacttttggacattttaatatgtaggtacctgaataaagagcaccgctaatttaccatttggttcgtagatgttcacagtactgggaactcaagtaacttgaaaaacgtgacaggtattgtatttcaaagctagtttacttatcatggcccctgttggccagatgcctcttgcaggattcagccctttgctagtagacttgtcctaaggaactagggtaacctaagatattttttatagttcaacaagattcccccaacatccctccaaagatttacaggagaaaaatcaggtttctgctttttacagtaaagaaagacaaattctttctttcccacagacactaaagaatgacctgattggctatttgaaatgactgcgaattgttgggtcccatgaagtattttatagaaagctctgccaaacaattttttaattatttaattaaaagaatcccctctctgattttttttttttaaaaaaaaaaggtaataagaacttgggacaaaaatttcattataaaaatgcttaagtggcaataccctaaaagaatgtgtctctaatattgtagtaagatacgttttctatccaaaatataatcgattcaccttattaactaacacaatatcagcattataaagtggttgtatgtggctttccttaataaacaatccaatacataaaaacccttgctggtcccagaaatcttttttcccctggagatttttaagcaatacttttttcactactgtcattcagtaattgaactgtgtcagccaaatgaaaacttttataagcttctcagaggacagtgcagtggtactgtctccatttatataaatcgagtagggcagctaactttcagaaggctggcagtgggcaggggtgcaagttacttcattgttgaaccattattgccatctattgggctcatcgtgctattgcattgtgtgagccctgaaagatagtagttaaatcaatttagaactttcgaaccatttagaacaacctcgctgactttttacttgaaaatcttttttatataacggatatttctgggtctgactgaagcccatagctatggaagaatgtaatgcttcatactgatatgaatatttaacctagcagaaatgtccattaattcttcaggggaaaaacaattcatttaaatgagtgtatattggctacatatgaagctgaattatttctgatggagttagatttccaatcatgctgatatttaaggacttacccatgttatcctgccctcttaaaaataatatcagcattttctacgatatgcacttcgttgtgatgacaatacatccatcaaataagcttgcagacaaatcataggataaagttggcccttcacgatttttatgtagtgactttgctgccaaagccccagagttcctgccccagctcctaacttctttgacttctgcaaggtcctctctggccttgggaaaaatgtcaacacaagatcactgagctatgtgctggccacgcattgcatggaagagtcgcggcttgggaaaggagggaaagatgaaggagggatagatagtatatctgttttcggggtcatagagaccctgagagagtgtttgtatatcaaaatagaatacatgtaccatagaaagcaaactgtattaaatgccagcaaactgttttcaatgccacgtgtttaaaaacatatagagaaaaaatattgacacgcattttttaatagaattttgaaattttaagtgctatttattaacaaatccagtttaggaaaaaatctatattcaaaatgtcagtataattttctataacgaataaaatttaaatccttgaaaaaaataattttaaacagcccaacttccaaggaaatctgtaattgattttaggtaaaatatgtgttacaaatgctgtaaagctaaatgttgaaatggtgacatgatgatctgttattaaaatttgacaggagaagctgatacggaaagtgacgacgacgatgatgatgatgactgtaaaaaatcttcaatggatgaggtgggtacttagggcttctggtccctaaggcattccaccaccctgtactctcctgggtctgtctcatggtcactttctgccatctagtggcaaaaagtagatttgtgccttccaattgccagcttcaatttttgaggcaattaaatggcttatgaaatgttccacaatccggagaagatatggcgtttagaaaaatgatcagaactgtgacattcattgcattgttttaattttggaacactagagctacctatttatataaacttaggcatcccgagtaacttgattagctcaaaaatattaattgcacagaacctagaagagaatcagaagcagatcaactggaattttagaattttgtcttaccaaaagtttatactgaaacaatctgggcaacagagagagacctcacgcctttaaaaaaacaagttaaaatgaaagataaaacacatccaggtgcagtggtgtacacctgtagttccagctactagggaggctgaggcaggaggatggcttgagtccaaaaatttgaagctgcagtgagctatgatcacaccactgtgctccagcttagaaaacagagcaagacactgtctctctttaaaaatacgtattttaaagtttatattgaatctgctttcaaatttgttagatatgttctgtctcaacgcttgtagctctacaatttagtaaaaatgaaacaaaaaataagctgctcttacttgatgtccttcctcttagaattattttttaatgtctaaagttttgcttaattatgttccctcactacatttcaatttttgatttccaggaggaaaacagcttaccatgtctggcaaagtatatgttcctgagaatgatttcaattgtgtataatttctgatcagtgattctaaataatttttaaactctcttactaattggatagtccatttgcaaatgaatgtttcccagttaacatttgacccaaatattactaccagaatttttaaaagaaactcatctccatgcattctctcttctaaaaatgtgagacaatattagatcactctacagaggcccattttgtgccaacactgcattattggttttctttttcattaaaaactctatcaaagtaatatgtcatagctaataatagcaaaagcaacatgagattgtagtaccacttgccaggcactgttctaagctccttcacataaattaacttattttttaatcaaaaacccctatatgctgtaggaactgattttatcctaattttacaaatgagtcaagtgaggcacagagcaattaagtaagttgcccaaggttgcccggtttctaactagtggacttgggattcgaaatcaggcaggctggctctagaacgcgagccattaatccctgcactatgctttcctgcttgtctaagacacatcaggagccaagaagggagggagggaagaatgttgatgaaggaaagcagttgtttacccacccctgcccatttccacaaagcaatctttttattattattatcaattttcccttcatttggtggtcacctacctaacaattttcttattgtacagtgaattcttaatttacgaatccgatgagaacacatggacacataaagggacatggggcctacctgcgggtggaggtgggaggagggagaggatcaggaaaaataactaatggatgccaggcttaatacccgggtgacaaaataatctgcacaacaaaccccagtgacataagtttatttatataaaaaaaaaaacctgcacgtgtagccctgaatttaaaataaatgttaaaaaaaattactaaccttagacaacacctatggacaccctgcaatggaagatgagctatagctcagtgcttctcaaactttgatgggcattccaatgaccttagtaaaatgcaggatctgagtctgaggcctgcagaggggctaagatcaggcatttctaaatggaaaggagggggcaggggatagggagtgattatgttggggccatgctgccagccaccattcaacctcccacctcccttcctccctcccttttataaaatgaggtgttgctgttgcctttctcctgtaatgaattttcattttgtaattttcagaaagggagggatgattttctgcatgcttgaatcatgttgtcattttcctgggaaaataactgataatataatgctgactctggaaatgttttcttttttattcctacttccaggggactgctggaagtgaggctatggccacagaagaaatgtctaatctggtgaactatattcagccagtcaagtttgagtcatttgaaatttcaaaaagtaagttttccctggagaaaaacccctcttgcagcatataatgattatattttaaatacggagtaatgggaccaaagaatgttacccttaatagagagatttatgcttttgaagtcttaaatatatgtacattttgactgccttgttactttacacatataataaatatgcatgtattgtaatatataaaaataaccatatgagaaagtattctatggtgttctccaaaaatatttaatagggctacaggccatacatggctatcggaaagacacatgaccagagtacaactaattgggaattgtactttgctttttgttcgcaacacacagtgagatccatctgttacataagtgataatgttgaaataaactatctacctgtttcccagaagggaagcaggcagagacttgatgaaccctgataattagaaatagaaccaatttatctatattccatttgtccatcacatgtatatatttagaagaaaatgcattaacttcacatcactttgtgttttccctttattcaactatacatccatacttgtgcaaagaaaaatatcatctttacccagacaaaagggttcttttatgaaaatgccccttgtatttgcatgaagcgtaagatgctatcagattaagggaatccttgaaacttactagccacttataagggtgtacccttaaaaacagaaatttgcctaaatgtactagcttctaatcaaggatggctttgcagctatatcaaaatccaagcctctaccaaacacgcttgtttatatttgtataatcttacaaaaagtcttcacttagtggtatatgcaacctagatctctacaacaaagaattcaacttccaagagtttatatataatgatttctcaacattgaattcgatgtcctaatttctgatgtttcttacaagttgttttctttgaaacatcctagcgtagttatttttatatcactgtaatttcattggctgcaatgagtttctctaactcattagttaaaagttccaagacaagtagccaagtgtgagaaagagccaatatatttagattcttcagaacctggaaacaacagcaccagctagactcacaaacaagcacttttctccttgtgtttaatatcattttataaccttgaaaaaagaatattcaacatattttaccaagtacctattaatgttgactgaattttaattaatagttatgcttaatttaataagtcatataaaggtagatttatgatggaccaaaataagagaagccaaggtttgccttagagtggattggagaaggtgagaagatggatgacgaagcctggaaatcattaagaagaacgaggttttaatttcgaaagagaggtcaaagagggaaaatatctcaaagataactcagtttaaaaaaattcagagctatataaccaccctgtgctatacttatctaaaatactgctcataattgttggtttttagtggggatgagggtagagaaagtgattctcggtctttctaaactaagataactttgttttctttctctcactctaattggaggcttgaatttcactttcaaaatgtttctcttgtgtttagcacatcctcctctctggcctctattttattttatactttattagtccattctcgtgctgctatgaagaaatatccgagactgggtaatttgtaaagaaaagaggtttagttgactcacagttctgcatggctggggagacctcaggaaacaacaatcatgaggcggaaggcacctcttcacagggcagcaggagagagaatgagtacaggcaagggaaatgccagatgcttataaaaccatcagctctcatgagactaatgcattatcatgagaacaacacaggggaaccacgcccataattcaattacccccacttggtaacccccccttgacactgtgggtattacaattcaaggagattttgtgtggggacacacccaagccatatcatgtatctaatatgaaaatgaagccatgagactggaaaatttccaaggacctttctgttttgaaagaccataattctgtcatattagttatttgaaccaaaaaagtatatacaaactgataaggtggcaatgtgggtatgaaagagatagtcagcacctagcacaaacattcccatggtctcttttgttaaaccccatattggccctaagaaaaaaatctgggtgaatttagaacaaaagattcccacggggtccctgctcttttgacaaatttttttattgccacactatactcatctagaattcattcatgtccctaaattacaaaagcataagtagctctgacccaagtagcaaacgttagaaaagacaactaacaagactcaacttttgttacaggtaaatagtgcactagaaaaaaaaattaaatattgaaattacattgaggattatttgccctcaacttcactgaatatttacccatttcttttataatgttataatttataacaatgaattgtatttctcaccttccccttttttgttttgttgttgcttaactcagaaagaaataaaagttttgaaatgtcttccttcgtggaaaccaaaggacttgaacaactcaccaagtctccagtggaatttgtagagtatccttgatttgacgaatgactgcagaatgaacacagctgaagtcttgtgctatttgttcatttggttttttaataaggagaaagatgcataaaatggcttaagtatatagcctggggcggataaatagtttcaggtatcatatacaatgctgggcggggtagtctggcctatagaacaaaaaactggtcttggaataaaggaagcgtagatttcaaggttgccttcacaccaccaagctctgtgtctttaggcaatttgcttaatcctgactttccttgtctataaagcagaaataattatactagctttatggtttgctctttggattaggtacaacatatgtaacatgagtgtgcatactttacacatatataagatatatgtaaagaaatatatacctgacttggcatctcacatacttatatgtactatatgtccaaatagtagggatgatgatgatgacattgtaaatataaatatacattactaagactggatttattgatattactgacaacaaaaatttttgctactatccatgaactaaaataaagtgaaacaggctattaaatttctttcataaaattaacagtaaatatcacaaagtgctcaatttcatgtaataagtcccagaataaagttaacctttaaaattcatcagtggaagaagaaacaaatgttgactccataaataaagtcctgctagaaaattatcatcgttagtattccttattgactgtgtgatagatcttgtcttatctcatttaatcctcacaatagtcctatgacatagaaattgttaaatctattttatagatgaggagactgagtcacagaaagacaaaataatttgtccaaggttattcagctagcaagtttgagagttgaggttcaatttcattttgcctagctcagaaccctaaccaaccttcacctaacttggtgataggaactagtcagtcatgttttaaagacatagcatggtccaacaactacaagattcttaggatagaaaactgataatgataggaaccaaaatattaagcaagatcagaaacttccatggtacattgaccttgctatcaattataaagagtaccacagtcttggcaaatagcattcccagagaaaattaataaaaattagcagacagcatttcaaaaatagctatacagtgcatattatctacttctgccaaacacaatatcattctttcaaatgatttaacacattccagcctccttgtgtgtccttagtcattaagtctgtccttaatactctccacaaaatcacattgactttggctcagccactttttgctaccccattgacttttacccacggggctctgcaaaggtgatgctatgcctatgtgataagagcatacttattctgtttgtttagaaagctttttgcatatttgatattactgacaacaaaaatttttgctattatgcatgaagtgaaataaaatgaaacagcctatttaatttctttcataaaattaacactaaatatcccaaagtagcccaacgagatcatcaatatttacttcattttccaaatggagaaagatggaaggtagcttcttagttactattattgactaaatatttttataattgtattcactacttaacatgatggtccagatataacaaaatgcagcttagcaggatatatccaaaaggaacacgtgtggattcatccaactatatgcctcagctcttctggaatgcaggttgtcagatggtggcacttaatttccagacaatgggtaagtacatgcttgttcccattctgctatgaactcacattgccaagtgtccaaaaaccattcttacataattgggggagagaaaattgccagacttcactgaaaaaataaataaaagcaaatttcaatgaagggaatatcaatgcataaaaaaagtgaattttgaaaatcgagacatgttcttcaattattctgtaaatggatctttatttctacaggctttgcattatttttcaaacaaaaatttttatgctttttaagataatacatatttattttgaaaataatggaaaattcagtaagtattttaaaaacaaactgccaggaatgctaccaactcagagattccacagtgttgacttttagctttgtaatctatgtcttttttgtctacatataaatgctttttttatgtaactactcatttaaaataaatacatatatattcatatatacatatataaacacacactcacctaagtgccatagagagacatgaatttcaatagctgcatactaagcatatttcacaattcgctaaaaacttatttctattccctaaatttcttttggaaaatattttaaaaacagaattactaacgttaaaagatgtgaacagtttaagtacctttatgaatattgccaaattgtctgtaaaaaatgttgtgctacattactccgctgtcagcaatgtttaatatgacgtggcctctcatttgcgatcttggttaagtattatcgttaaataataataataattaaaccagacaaaaatgtgttatttcactgttattttaaattcatttcttgaatcattattaaggttgaactttttaaaatatgtttcttggtttttgtatttctgcttttatgaattacatattcaggactatcgtcaattttcttgttgatttataacagcactttttatttaaagggtatattgtcttttgtgaaacagagacaattcagtggatcaggtcaggctgattaatgtttaattaaaagttcttggtttacttgtatgattacagcctcctcaccccaggatgaaagccttgtgctcccatttttctcatggtttcttttttatttaaccttttcaaccatcaaaatttaattttggtccatagtctcagtgagatcaatccttttttttcatcctaaacaatcatcccactgaactggaattacacgttaatagatacagcctttttcattgttgttgttaattcagacccattttttcactttgtatcttttccattaataaatttgtctgccttcctggatgcaataactcactgtttttactgtattttataatatggattaatacctggaagtggtgattctcctttactactattaattttcaattccttttttgccattgccagtggaattcttatttcaaataaacttaatttaactgtattatgttttccttgactactaaaaaaaaactatttttaaaatcatattaactttataaatttatctgacaaaaactgacacctttttaatttttagtttttctgtcacaggaaaaatgcttttctctttactttaaaattttttgtattaagtcctcagcaaaatcacttgtcttcattagaggtctagttttcttagactgaatctttctttttatttatattatatttttaacagattgtttctggatatttatatttgtatatttgtttattttataaatgattgtattttacaaatgatcatctttctaaactcttataatagcctattttttgcagtacattccgttggaatttttagacacacaaagacagtaatttaatcatatctcatttctccacctgccttatttattgctttggccttaccgttctcaggtattaaatgagggttccgagtgggcatctttcttttttattcagtaggaagttcaacattatgccttttattaagtatctatcaagctctaagccacgattaagagtaatttgctagatatttatggctttttaaaatcaattaatttatttttattgatacataatagctgtacaaacgtttgcagtacgtatgataatttaatacatttatataatcaaatcagagtaattgggatatccatcacctgaaatatttatctttacattagaaacaatcgaattgctgtcttctagctatttttaaatgtacaaactattaatgttaactatagtcacctccttgtctatcaaacaccaggtcttaacgtcttctatctaagtgaagagtgggcatctttctcttcatcctgatcctaatataagtttcactgttgtgatatcatcaagtcagatattggctgtgactttgagtcagatattctttaacatactaaaggacacgggtcctatttgactaatgttttagaagttggtattgaatgttattaaatgtctcttggacatccattgggatgatcatatgttcatttttcagacataaatgtgataagttatcttaatagatctcatttcctaatatataattatccttttgttcccaaaataggctctacttatttgttgtgtattatttttagaacatatgacttgctaatgtaatttttaggcttttgaagctaattttttcaagtgtcataaattcattattgttttgaaattttgtccaattttgacatcatagttatgtttataaaataatagtttaataagagaaaatttcactgatttttttctgctctaaaaatgatttgttaaatgaaactttagaataattctgccatcacctctttattatgcacatagagatgagtcatgacacagataatctggaactgttgacaacttcccagattctttacaactttaatatgtattctttcactctatcagttgcaatatgtgtgaacgttcatctgatgcactgagtctgaggaaaattttgaccagtaacctttgtccactggaaaagagtctatgtagaattagatgttaattgtaagtaatcacagaagtgcaaattataaaaaagaaattttttgtacaaattaaaaagcaggaaaaggaataatagaatcctcttttaatgaggcatggagaagtccattctcaaaaacatggcttagtagtataagctggtttaagctttctgaagggcattttagcaaggcatcaaagaaaaattttccaatgaggacatcatttgtcccaggaattcctctcataagaaaatcactgatcatggcttcaaagatttcaccacaatgatgtttatcaaaacattataagggtgaaaaattagaaaaaacataaatgtgcccaaaaggggaatggttaaatacattatattctaatatattgtattagatattatattctaatatattgtattagatattatattctaatatattgtattagatagtgtatcatattagaaattagatattagaattagaaattagaaattagatattagatattgtatcataatattctaatatatgctttatatattagaatgatatatttaatatatcattctaatatatctaatatatattagaatgatatatttaatacattagatattagatatattagaataatataaataatatatctaatatatgttagatattagatattttgtatatactatatttatatataattatatattatatattagatatattatattatattaatatttaacatatattatacaaatatattattctaatatatttaatcaaaggaatttgagacagctgttataattaaggcagatacatattaaatgaaatcaatatactgtatgtcaacaatatatttgaagtggaaaagcagactgcacacccaccagttggcagtgattatttctggacttggggattagaggtaatttttttcttatctgtgtttcctgcatttctacaatgactctcttccaagggaatacagtcacaaaagtggactgggatcaactttactttacaatcttactttcttaccccaagtatagataaactcacaataaggcttgtgtttttgatactcagacctggctatgcaaataaatatggggatgtatgaatacaacgggaagagtggctacagattgaagccagagttcatgaggaggcctgacaagcattttgatccatttactgaaggcatcgtagatgggatagtggcaaacactttgtctgttaaggtaggtataccccatcacaaaattgttcctaacaatagtgttgaatttatctacattgcataaagaagtggcttagtcattaaaaatttagtaactaggaaagattctactttcttcctacattttttttctctaaagatcaaatacacattaaaagttttcgtaaggggtccgtgtgttctcattgttcaattcccatctatgaatgcacacgggaaggggaacatcacactctggggactgttgtggggtggggggagcggggagggatagcattaggagatacacctaatgctaaatgacgagttaatgggtgcagcacaccagcatggcacatgtatacatatgtaactaacctgcacattgtgcgcatgtaccctaaaacttaaagtataataataataataataataataataataataataataataaaagttttggtagggtcgggcgcagtgactcacgcctgtaatcccagcactttgggaggccgaggcaggtggatcacgaggtcaggagatcgagaccatcctggctaacacggtgaaaccccgtctctactaaaaaatacaaaaaaaaacaattagccgggcgtggtggcgggcgcctgtagtgccagctactcaagaggctgagacaggagaatggcgtgaacctgggaggtggagcttgcagagagcccagatcgcgccactgcactccagcctgggcgacagagcgagagagcgagactctgtctcaaaaaaaaaaaaaaaaaaaaaaaaagttttcataggccacatgaataagataaagcgactgaactttattcttaatgataaaaatctgactctaaatcaataaaatgagttggagagactcatcataagcaaacctcttttttggtgtaactaacctactatgaaatttacatgataattagtggcccatattggagagattttccggtctttttttccccgtttggttcttagaaaattagagacagaacattccctcaataaattatcaaatgttaaacaaaagctttcaaattactttaaatggtttttgaaaatcttccagagtattcagagattttaaaacacatattaatgatcattaaataaaagagttgctttattaaatatatatgtatatatacatgtatgtcataaatatataaaaatcatagatatatacacatacatatgtatatctgaccctaaacaattctaaatttttttagtctttgaaattgattttatatcagatataattttttagctaccagaaaatatttttaatactatgaaaggaaaatcaattttttagaatacattttacatggattcttcatcgttaaagcttttcaaaaatattgtctgttttctgtttaactgaataactatagaactaagaaatttttttactggacataaatgtaattttttgattaaccttaaacaaaggcatttgaaaaactatgtaaaaagctttctataacagcttcactaatttctttctaccctaagcagttgagcacatttttaccttaaaactttcgtcactttatatcaagggtttaaagaataaaatttcagtgaagtgtctcataattatatcttttgaaattacttcaagccacatgtataaagagttcaagttggcagaattagagtttattttaggaaagtattttcagaaaaggctgtttaattcctgtcaggtgtgataaagataaactcataagctccatgtactgatagaatgctacttttagaatccttgtcaattgttgttatagttcggttgaattaataatatttttgctttgcttgcagattcgtcttgttttgaatgtatttgtttgcttatttctttttttgtcttgaaaatcctactgtgacagtaagcaattataaaacaatgacacagaggcaggaaagtacattgagttgtgaaggggaaatagttgatccccagacaagtgtaacctgctgctcctgtccagaatggagacgctgctccagagctgtcagtctcccctgaatggacagttctcactgcagtagagtcctacctttgacattatagctagagccaagatacagatcataactttccaattatgcctttgttttcatcttctggcatagattttataatgccagaatggacttgtgagctcacatgatgttctaccgtcctatgttactgacgagagcattgtggttttggtgtcatgaatttagtttaggactctgctttggtcaaacatcttaaacatacaacatcttctgtgcatctgaattccaagtaggacttgcataacttagaagtttcaaacatgttttgaaatgcttgcttatttcatagacatagttctcacatagaacctcaagttaaacaaagagattgttgctagcaggtcccatgcactcaagccaaatagaacatacaggggaaatgagttgtcccagggcaaattcagagagccttcctgatgactttctctctgaattactcagaatttctgacaacatcagcatatagctgactttgactttactcagcctttgatagctattctcatgccaccattttgtctgatttctggcccagccataattctgtcccctttcacaatcttgagctcagattgtgagcccagccataatgctgtccccttttcacaatctggagctcagaaagttcttgaccagcaggcaattttcttgtaaccacataacccagattcaccaggtttgctctgtcagcacttgcttcctgctttccccttcctggtatacagcagaagcacatcttgtttgcctccgctaacctttatgacagctggtggatagttcagattttgaaaatttgcatagaaacagaggcagacatggaagacatttataaatacgtaatattaaaaatctcttttaagtctataatatccattagttctgtagctagacaaagatggtgacaccttgtgagattaggggtaatgataaacttatcttgatggtttaaagtgaatacttgttcatttattcctcctacaatactgtgtcttattaattgactacttctaacctcaccattttcaatatccttctaccaacctgtgtttgtccattttcacactgctataaagaactacctgaaactgagcaatttataaagaaaagaggtttaattgactcacagttctgcatggctgaggaggcctcatgaaacttacaattatggtggaaagtgaaggggaagcaaagcacacctcacatgaagggagaagagagagagtgaggggggaactgccacacacttattaaaccatcagatcttgtgagaactcactatcatgagaacagcatgagagaaaccactcccataatccaatcaccctccccaaatatgtgaggattacaattcaacatgagatttgggtgaggacatagaaccaaaccatatcataacccattaagtgaaagggaaatcatatttctactcttgcttctattccattttgcttataattcaacatttgctgaagagcatttgtggctctttaaagtattctcttatgtctttgttatttgcatatcaaaattccttatggattgattgatttattgattttctagattatttcaggtcagtttctttctgataagaaagttgggacttacgtggaagtagatatgtttggtttgcctgtggatacaaggaggaaggcatttaagaccaaaacatcccaaggaaatgctgtgaatcctgtctgggaagaagaacctattgtgttcaaaaaggttggtcacatgttcttgatatgagttataactgcatttttcaggtgttttacactgagaaaataatgaaatggtgaattatttgttatttaatttgaaaatttacacacttataaagcaattaccttttgaaagccattctgaaaacccttcaagaattctgttaatcactggtttggattttcagaattgtattgtaaatcaattcattctagtatgcctcaaatggacggccataaaaacatatacatttaactcatatcatctgatagtacaaatgataaatgatacattttaattataactcaaagaagtagagtggaagtagggaataatatagtggctgagataaagaaaattcatatttcctttaaaaggaatattatttaaattccccaaaatctctagcctctgagagctggtcattcaatcttgtctgggttctatctaataaagttgaaacctttcacactcaactgggcccttctctttcttcaccaaaaagcaaatcttcacacatgcttatcatgtaaaggaagaaagtaggttcagtgggaagtagactttttagcctactctttgcttttttctggccaaaatatctacaaatccagtcttctgcaaagagaatagctatgcggaaactctctgtgctctgggatttttccatatgttaactgagtttaataataatgcttactatactgtttacttcttacagttattatgaatattccataagtaaatacattgaccacacttaagaaatatctagcacaatgaaaatattcaataaatgtgagtttgctgtttttgtaaacaatacatttttaaagagatagtcgacttcatgttcttgacataagatataactgcatattttagatgtttcacactgaggaaagaaatgagtagttgctctttgcttactgtgggaatttacaaatttataaagcaattgtattttgaaagctgtcctgaaagttattcttgtttttcagtggtggttgttttcactttttttgctttcactttgaagatgcaaaagtcatttgctttgaaaacataaacgacttccacaatggttgaactagtttacagtcccaccaacagtgtaaaagtgttcctatttctccacatcctctccagcacctgttgtttcctgactttttaatgattgccattctaactggtgtgagatggtatctcattgtggttttgatttgcatttctctgatggccagtgatggtgagcattttttcttagtgggtgcagcgtaccagcatggcacatgtatgcatatgtaactaacctgcacattgtgcacatgtacccaaaaacttaaaagtataataataataataaaaattaaaacacaaattaaaaaaaaagaaaacataaatgaaatattcacatggtgataaaaccactaaactctttttgttgaaagatagaacttttgtcatttccacattgagaatgttcatgtaaaaataaaacagcctatttttttaacaaatgcctcattaaggcaaggtgataaaacatagatgaagccctatctctggcaacccatgtcttctcctctgaaaatgaaatttatagggcaacatctcaactttttgtctaaagtagctaagtagaaacttctagttggatctgaaaagctggtcctggccaggcgcagtggctcatgcctctaatccgagcactttgggaggccaaggtggtggatcacctgaggtcgggagttcgagaccagcctgaccaatatggtgaaatgctgtctctactaaaaaagtacaaaaattagtcaggtgtgggggcatgcacctgtagtcccagctacttggaaggctgagacaggagaatggcttgaacccagaggcggaggttgcagtgagccaagatcacgccactgcacttcagcctgggtgacacagcaagactctatctcaaaaaaagaaagagaaaagaaaagctagtcctgattgaataatacctttctaattatttcttggaattgttcattcttataaccaggtgtgtccttaatgtcctttgtaggtggttcttcctactctggcctgtttgagaatagcagtttatgaagaaggaggtaaattcattggccaccgtatcttgccagtgcaagccattcggccaggtatgggtagtgtgctgagaaaccttttatcaaagttgcaaagaaaatcattactgcttaaaatattactagaaaatgacttaagaaactattttctgctttgtaattttgttatgtaacaagggcgatgagatttagttacatgtttttgtgacatgttgtagtattaatgttagtcaactctttcaacaataattatgtgtaacaaacaatctgaaaacttatatgcaaatatttatcttcgtgctcataggtctgtgggttggccgggtttggctaatctagcctgggctccgcagcatagctgtgcttcaggttctgggttgggtctatgtctgtcccacatgcgctcactctggggtccaggctgaagtggcagttgcttctacaatatggacttctcttggcagaacactggaatgtctaactctgcatgtgcattttaagcctctacctacaccaaattactaatatactgttgactaaagcagagcttaagcacaagtcaagaaatcacgtcaaggctgggcatggtggctcacgcctataatctcagcactttgggaggctgaggcaggaggatctcttgaggccagaagtttgaaaccagcctgagcaacagaatgagaccctgtctctacaaaaaataataataacaattttttaaaaaaagaagtcatgtcaagtataattctgttatgggggcaagtttggatcaataattcagtctatgacatgtgatttggaattatcttttgtgggaaaaatcatacggttggaaaggaaaaaatcacattgaatgttttcttgtctgatgagaaaaataatgccttatcattcataaatgttattaaaatgaaaaaagtgatttgtttttcatctaaagtaacctgaaatacatgctttcatcacatagatgcgcataattataactaacattggaaaggaaatatgtgctacacagcattattctcaccttccaggctatcactatatctgtctaaggaatgaaaggaaccagcctctgacgctgcctgctgtctttgtctacatagaagtgaaagactatgtgccagacacatatgcaggtaaacaacttaactcaaataccactttactcaaaggggtatttctgtctgagtcaccatatatttttgggttagtgaaaggaaaactgaaccaaacaaagcaggagattctggcttcagaatcacccctactttcgtatgtatgtttagaggtaaattgcttgagccattgtgaatacattttaatttaacgtattttaattaaaatcacaacacctcagttttttgaatatttattcccttttagtcttattctcatgggcccagcacttaccaactcatgttatccattacaacaaatgtctaggtctgtacactgaatttgtcttccaccaattttagaatgctgattcttttcatgggtgacatcctaaatttaaggaattaaccaagaatcataagtgtaaatgcttatagtgccaagtagcttgggtgtaagacactggggagtagtggagaccatggtaagcttggggctgtccatccaaagctggcagccataactcattccagctaggcactgcccttcaaataactatattggcaaatcattgggttatcccaacagtccggaaagcaggctttttatgtaaaatgtctccatttatgaaacgtcatttgggccaaataggacaattgggtgggccattgccggaatggatgggaccttcaaaaagaaactaaggaatcaagaatattcagggatcctgagttgaagcctgtccagtttgactctcagaactaaactcttaatttctctcttcctgaagtttcaacagagtcctaacccttgtccatgttcaaagtgttggatagaggagtagatagttatatgggtagacagaagaatggaagatggataatgactgggtggatggatggatggatggatgggtgggtagatgggtgatgaatgaatgcatggactgatggtcagatagatgagtaagtagatgaatgatggataatcaatacttccaggacctttgatctaaaatatctcttccctatttagatgtcatcgaagctttatcaaacccaatccgatatgtgaacctgatggaacagagagctaagcaattggctgctttgacactggaagatgaagaagaagtaaagaaagaggtgagagggtgttttaattttacatatagcattaagcatgatcaccacacctacttgttggctttgcctaagtaatatcacataccttgggagaaggaatagcacattggaacaacactttcatgcagtttagcatcatgtcacagaacatctagatgattgacttaaatttttcacatttcattttcttttggcattctgtggataccacgagcatcttatcttgtgataaaattaaactgcacacatcttgctatttcagatgaaactttctacatgattccatgctaattaaaggtgatgaacgcatttaaaaaggaagataatcatcaaatcatttagggtttccctttatctttaatgtagcatgcaggattttcaaagtgcttttctgatttttatagtacataaaatatttaacacaatacctggaaaatagtatgagtcataaagagtctactgttattattagatggtatatttatgtattataatgtgtgtcctgcaaataattgatatattattccaaattagatgtcacaatgcaaagcataattaaggaagggtctaaaaatagtagaaatgaagtttaaatttataaagcttctatgtagactggcagtctttttgcttttaaaaaaagtgaattataacttgattattaagggtgacactaatattaaaaatagtgataaaaatttgctattttcatattttattcagaggaaaaactcgagaaaaaagatagaaaatggagaactgtcagtattgggggaaaaaaccttgaaaattgttttaataagtataactaatagttatccattaaatagtccatttaaatagtctattaaagttgacattgttaagtaatgtttttcttatttcgaaagcatcctcgatttattatagaaaatttaaaacgtaaaaatgacaaaagaaaacaacaaagaaatcaactgtaattcaaacatcccatccgctcagagatagccacattaaatgtggggtgtatacatatctagtctttttatgcacaattgttactctttcataaaatgggataatattcacagtctgtgttttaagtgaaaataaaagtattaagtatctcattgcccatgtcattaaatattcttctatgacatgacttttaataactcatagccttctatcatatagctccaccataatttaattactaagtccccaattattggatatttgcaatgctgcactattttattttatttgtgggtacatagtaggtatatatgttacggggtgcatttgatattctgatacagacatactgatttttgtacactgatttttaatcctgcaactttactgaatgttaatcagttctaatagttagttggtggagtcattaggtttttccaaatacaagatcatgttatctgcaaacaggaataatttgactttttccagtttggatgccctttattttattttcttgtccagttgctctagcttggatttccagtagtatgttgaataacagtggtgaaagtgagcatccttgtcttattccagatctcagaggaaaggctttcagtttttcttcattcagtttgatactagctgttgaactgttatatatggctttcattgtgttgatgtatgttacttctatacccaggtggggtttttttgagggtttttatcagaagggatgttgaattttatcaaatgctttttcaacatcaattgaaatgatcatatgggtttttttttccttcattctgttgatatgatgtatcacattgattgatttgcatatgttgaaccatccttgcatctctgggataaatcccacttgggagaatcatagctcagtaccttgtttgtggtgggcaacttctgtgttgcaattcatgctccagagcaccctgtgggatcagtctgagactggagtttgcctgaggccacatttcgacttatcttcttccctgtcttaacctgcttgcctcacctccctgcagttttttcctgagaccattctctcagttactcatgtgctcaacatgtgctcaagaatcctcatgtccacttctgcttctagggaaaccagcaatgctaagtagcttgctgttttataaataaatacaagaatgagttccctatctgaattaattcttaatcaaaattaagaatttaaatatttgaaaatagttacatctctcattctgatatttcttcagttataatagtgctttttctcttttccatggcctttaaaagattaagaaagactgttctatgagtttctcattttactcatatgaacatcagtatgaaattaatttctctttggaaatccaccaaaggttctcaaattcttttctctttttcctgctttacttaatagcatatttaataaactataattaaaggtaaagataatttacatagatacaaataaatcactattaatatcattcttctctaaatagaaaacaggacctattaggtacaatgcatattacctgagtggcaaagttatctgaataccaaacccctatgacacacctatatgacaaaccctcatgtgtacccctgaacctaaaataaaagctaaaaaaaaaagaaaacagaaatgtcctttttcaactggatgaattttattctgtaagaaatagaggttaaacaaaagcattttcaagtgaaattacatgtattttcagtatttagaggaaatactttttagattatcaactttaacccattagttagccattgtctctaaggaataagcacttgcttcaagagaacatttcaacactaccatatttcagcctactttttctattgtctgactcacatgttcttgtgagtgagctgaaatttatctaaaattgtttcaaatagctgggtgtgctgacacatgcctgtaatcccagctactcgggagcctgaggcaggggaattgcttgagtccaggagacagaggctgcaattaactatgaatgcactactataccctagcctgggccacagagaccatgtctcttaaaaataaaataaataaaataaaataaaataaaataaaataaaataaaataaaaaaataaaattgtttgtaaatatttcctgattcagtgtatggccccgattcgatatagcaattgagctaaaggtctcataatggaacattttactaatggtgcttcagagatcatttctgtaatgactaggggaaaatgtcactctaaagaatgagagacataaggcctttgaggttgtagggctcttttcacaaattgatgtcctttggaaaccttatctttgcaccatcaaaaagttattttaggaggataaaatgtacaaaaatacagaagtagagttttaggtcaatcttatttttgtttttcttttcttaaaggtgatcagaaagcatttttagaaatgtataatattgtttaaatttggacagtatttggacatttttcagttttagaaaaaattttagaggcatggaatcacatggagtctatattggtctaatagagaaaatatgattttttttcctttgacatgtctaaactcttaactggcctcatttttacaactcaaggaaaaaaaatcatttgcccttaacatgtaatgctaggaaagaaaagtcatttcacactttgagcatcagtgtgtcttttttcttgtcttggaataatgtaagtttgtttgaatgatgccactgaaaataagtaactgtggttttctctaaagaaaattctatctaggacatggcaggcactgggacactgttttagcagcaaagacttttttagtatcatcattttaatgtgatgcttgtaaaggtcatttctatttgaacattaaaaatgtcattggactgcaaaatattaccagatgtttaatagtcctgtaaattatctttttagagtaatttataaaccaaatagataagaaagtggaatttcccccatgatttgaacaatagatatttatttcagataaggcaaaaatacattattcagattatattatacatatattatgtgtataatatatgtataatatttaggttatgtattatctgaataatggttggaagttaaggaataataaagattcgttattggatttattttgtctttgtaaattcagagtggtagattagtcaagttgtagagtaagtgcctaactgaatcctaacaaagtataacattcacagttaattcctttaaataaaaagtcacgtagaaaaatataaaaacatagtaaactaaagaaataaaattttaaaaccctctaattctgcaaatactggtaacatttttaatgtatatccttctagcatgtttcctatgtacatttttgtttgtttgttttttgagacagagtctcgctctgtcgtccaggctggagtgcagtggcatgatctcggctcactgcagcctcggcctcccgggttcaagcgattctcctgcctcagccacccaagtagccgggactacaggcacccaccaccatacctggctaatttttgtctttttagtagagacggggtttcaccatgttggctaggctcttctcaaactcctgacctcaggtgatccacctgccttggccttccaaagtgctgggattacaggtatgagccactgtgtctggtctctgtgcacattttttaaaataattttttaaatgttttacagaccaaataatgtaattacagagatgcctagtgaaatatcataacactttttttctatttttaaaatacctataaaaggaaaaagtaaatatccaatacatttattaggaaatattatgtgataatgtcataaatgcaatatttgaatatgacttttttaatgttagagaagtaaagaaaaaaataatgagcatttactgagtacttactgtatatctgacactatgttgagccctttattttatttttcttttctcaagacagggtctcaatatgttgcccaagctggtcttcaactcccagctcaagcaatcctcccacttctgcctcccaaagcactgagattacaggggtggttcaccatgcctggccatgaagcttttactgtattcactcacttaagtcttaaaacctccggatgtcctaattaccattatttccatttaacaaatgaagaaactaaggcactgaggagttaaattgcttgccctgtgccacacaattagtaaagaaaggagttaggatgaaaacccaggcaatctggttctgcaactcatgttccacatcagcacttctgcatgttaagtgtgaagaccagggcatcatgataaattgctgatcctggttcactggatctggggtagggcctgggactcagcatctctaataagcccccaagtgatgggatactgctggtccttggagcacagtttaacaagcatctccaccacacacacgcactacctctgtaacaaagctgtaattttctggtaacctttagcaaggatgggcccttcattcatctttctgacctccatagcaggttacctgaatgagtgagcacaggatataagacctttaccttaaacagtaacatcttttgattgaatttttagttgaatgtcaagaacttcccccctttaatcactggatgttgtcagaacttattcttcagaaagttaggtttatctttgtgggttctatttgattgatttgtgcattggctggccaaaatacatatccctcaacttggaagttacgaaagctgtattcatttgccaagcattcatttccatacttgggaaagttgtcctctaagacagagtacctgaaactacaaatcttacccagccctcaaggccaaaattgttcacaagaattcccaacatcgtctgtttcatcctgcaagtggaagtgtgtgagtggtcttcgtgtaatattgatgttgaaaaggaaaagttgtttggtaatactaaaagtttatttattccaaagggcctactttttgtattgtctgactcacatgttcttgtgagtgagctgaaattcatcaaaaattgtttgcaaatattagctgggtgtgctaacacatgcctgtagtcccagcttctcgggagcctgaggcaggagaatcgcctgagtctagaaggcagaggctgcaatgaactgtgaatgcactactgcaccctagcctgggcaacagagaccatgtctcttaaaaataaataaaataaaataaaataattggtaaatatttcctaattcagtgtatggccccaatttgattattttaataatgatatgaattccaccaataaaataatgtgacatcaaaaaaatccaaggtagtgcttttataaggttacaatgttttgcccaaggccttggataccatttaattattcaaaacagaaacttgatatttcattcacaatataagaacttgacactaaaatcaaagatgaggtttacagcttattttggattctctttaaataaaattcttcctccttcaaatcttcctcctcaaataataaatttgcaagatattaatttatagaaacaatagtttatcaaaatccctgaactttaaagcatccaatacagtaaaaagaaaaggttttcctttaaatagtgatgctatctctttcatttctatactgtacagatttggcattcacaatgcactttcattggatgccttggataaaactgggtcctaactaggaaaaccatagtaatccccatttttagagaagggaacaattgctcattatggtagagtgatttggtgcctaatatcaacggccaatgagttgaagaactagggtctttttaaatatgtatcaagaaaagaccattcattcacttgaattgaaactggtcaatgattggttcaattcagctgcttttacgaatatcctccataaaaatttctaaaatttcaatggattctaatgaggggctttgggttcatctgcctaaaatagggatgagtacaataacttcaatatccatgtcatgtccaattataaaatcatggctcccaattaatgatgaagtttttcactttgctttagagcagggcttctcaagttttaatgtgcatacaggtgcaggaaatggggaggtgtgggtcaaatgatacaaagcaggaaatgtgtaggatgaacaagtaaaaaaatctaatgtacagcgtgaggactataattaacaatcatgtatcatagtcagaattttttctaaatgagtagattatagctgttcttgccacagggggacaaagcgggtaactatgtgagatgatggatatgtctatttgttcccttatagtaaccattttactgtacataggtatcttataacatcatgttgtatgccttgaatttacacaataaaatttatttttttcaacgtgcatacagatcacttgagaatcttgttacaatgcagattcagattcagtaggtctggcacagatcacaaaacaccgcatattcaacaagcttccaggtgatgcttatggcccatggaccatatttggattagcagggctctcaaactttagcatgtaccagaatcacccagatggcttcctaaaacacagatcgatgggtgtcgtagccaaagtttctgattcagtaggtctggggcggactcaagaatttgcatctctaacaatctgcagtgaagctgatgctggtctggggaccacacattaaaaaccgctgctttgaagccctgcatctttctttcgcaagagtgtggctctccccagatgaaacccattaattccatccactctaaaatgacagcttaatcacagaaacctgggaagggctccaggagacacttttcctgggaattatccagaatttgtcccgcaagtgattgaccatagtccgtaccaaacgatttgacttaattaatctcaaagatatatttccacaaaattaacattaagagttgttggtctactttcctttaaaaagagaaatccatgatttctacctagcagccaagagttcattccttctgaattctttgtaaactgtatcaaaacacttctaataaattcaagttggtaggaacttttttatatacatatattaaagtttgtatatgtaacacatataaaagggtcagcagagctatgttcttttaccctttgatagcctgctgagtaacctgctgttattatgcattaaatacaaacttgttacagacagcagaaagcagcatcttcactcttttcattcattgatttattcattcattcaaatttgttttattttagcataacatttaggtagttctttactttcaggactttgccattaataatagagctatttattatgtactaacaggaaactaaatatgaattatgcattcattcaatattttttttttaaaaaaacccaactatgtgtcagtcactctgatggccattatatatgtaatgctgaggaaaatcagatgctctcatagcccttacaacttggaggaagagagtgacattataaaatttatacatctatgtgtaaaattgcagctgctactaatgttcaacaaaatgataccatgtgaatgctgttgactcatgtgagtgcttatatgatgacacacagccatgctgtgtcaagattcacttgaacccatgctccagttaccgctggaagaacttgctggacattaactgtgcaaaacaccaaaagtactttacttggtgttaatgaagaagctcaaaaaactgaagtcaacagatgaatttatccagctcattaaagctgtctcttgcttctaactcaccctggtagactcttcaaaattaggagttttgacatatttcattatgaaaaattctaagctaacattgaaagagctgtacaaggaacacctatatatcagccacccggattccataattaaaattttgatgctttcacttgatcacatataaatccctctatccatttatctatccatcttggttcaataggatgcattttaaagtaggttgcaaacatcagtatacttcactcctaaacgtttgggagtgcatacagcaggacaaagtttgttaaagtgattctgaatttcttagaaatatgaggcagatacattatctaatttcattcaactaatagaaatttaaggtacaaattgtgctcatgtttgaagaagctcctccttaagggaaaggctggctctaacaaagctactttctgacaatatttgtcctgagtagggtggatttctgcatgatgaaattatgagactcacccgtaatacgctggaaaaactgatggccttacctcttacccatgtggtgcccatccaaagcaagatgctgtcataaggtaaaaagaactgcactcttttttttttttttttttttgagacggagtcttgctcagttgcccaggctggagtgcagaggcgcgatctcggctcactgcaagctccgcctcccgggttcacgccattctcctgggtcagcctcctgagtagctgggactacaggcgcccaccaccaagcccggctaatttttttttttttttgtagttttagtagagacgggatttcaccatgttagccaggatggtctcgatctcctgacctcgggatccacccgcctcggcctcccaaagtgctgggattacaggcatgagccaccgcgcccggccggaactgcactcttcagatgactcagacaaggaaagcatgatccaacacctctaatagcccagtaatacatatgatatttgaaaggcccttcacttaccatgttaaccattcagttaaatcctccaaatcctaattctctgctgctcaaccatcagatccaaactttcaatgcccaggacggaaatcttttcaaccagcacatcaaatggcttttcctccttctatagaacttataaaaatgatcttttcagttaccattttactggtccatctgtattctattttcagtgcacttctgttcattttggaattaggaagcgtacaaattctttttatatttaattttaacattcaagttaggcatattttgaagaaaaagatattgcaatgattgcatttgtccactagagggcaggaacttacttctgtggttcattctgcactttttttttcactacccacctaagaaaaatctagtcaatgcgactgaagtactaccaccttctgaatcttctttccttgataattgcttaattggaatttaaatctttgaatcaaattaagaaactagacattcctagtttctgtttctatcacaatttccagtaccagatttttattcactcataaaaacaaataatgggggagaaataaaatattgacttctgctgattctcttgagtgggataaggaatttggtttttgcactttggcttacagatccatatagtggaattattcgatctttcaattataatatcagaaagttcaattttagtattgtactcctataggtgctttttttcatttttcagccattgttttgcttaacttatttaactttgtatgtacggatgcctttttagtgcaacagggtagttctttgagaattatgtttacatgtagacatctctatctcagcagcaagttaagttattattacggttccttaagctgctgttatcatagagtggactgctgtaatagaaaaatttagtctttagcatatagtccatattcaaatacttgttcacagtttcctgtgtgacctctggcaagttacatgacttttaataaagtttttagtaaagacttttaataacacctccgattattttgctttattatggtactgtgcgtgttgcctacactgactggctgtgaaaaagctgttgtatataacagtgtctaacccaggatgatctacagccacttctaattgcagtctccattcggtaaatggaatcaattaaaatgtgtacctatgggctgggcagggtggctcatgcctgtaatccagcactttgggagaccgaggcaggtggatcacttgaggtcaggagttcgagaccagcctggctaacatggtgaaaccccgtctctactaaaaatacaaaaattagctgggcatggtggtgcatgcctgtaattccagctactcgggaggctgaggcaggagaatcgcttgaacccaggaggtggaggttgcaatgagccaaaattgcactactgcactccagcctgggtgacagagtgagactccatctcaaaaaaaaaaaaaaaagtgtctacagcccttagcaaaaaagtttaaacattagtcacatgtatatgttatagaatcttacttaactcaggcatcccaaccagtactggtctgtagcttattaggacctggcccgcacagcaggaagtaagcagcaggtgggcaagcaagcaaagcttcatccccatcactcaaattactccctgagctctgcctcctgttagatcagtagtggcattagattcccataggactgtgaaccctattgtgaactgcacatgtgaaaaatctaggttgtgggctccttatgaaaatctaatgcatgatgacctgttactgtttcccatcacccccaaatgggaccatctagttgcaagaaaacaagctcagggctctcactgattctacattatggtgagttgtataattatttcattatatagtacaatgtaacaataataatagaaataaagtgcacaatacatgtaatgcacttgagtcatactgaaaccatcccctcaataacctcctctccccctggtccatgaaaaaattatcttccatgaaactggtccttggtgccagaaaggctggggaccactgacttaacttgtatataacatctgtctccagaaaatcatgaggtccctgacaagagtcagactatgcaaggatctccaaattccttagcccagtgtttaatgtcctcattactgaccctcttctctatgcctttgcttggccactggggcgagaaggtaagaagctcctggcccaccgagttcccagcacagtcctgtcacttcagcattactaaggatgcatagctcactcttgcaccatctcagaattccaggcaaactctgctcctcctggcagagggtacagattggcaacttctgggccaaatgcagtctgaagatgtgctctgtttgtcttttcagtgattggaaactgggagagttcactcaaaactttcatttttccatttttctcaaaacctgggtggaaataggctaaaaatgaacagcagccactgccccatttacaggctgtctctctcctgctctggacatgacctcactttgccctattgcattaaatctacttcactggtttctatcatttccactaactgcctattactctacagtgtgaatagtatccttaggggttgtgtcccaagagtgacacagtccactctacatggagacatcaccaggtgtgacccctggactaagcatttctctaaagcctacttcaaagtccagcaccaacccttggtgcccactttatccccgactgcaaccataaagtatttgcctgaatgtttacttaacatctatctgctttttaaaaatgtctttgattttatatagtacgtccctttttggaaggtggaggctttgtctcacatgcccttgataagcagagatttattttttcctttatttgactcaaattgacaatcgaacttggtttcccaagggcatacagctacatggagtatctgaaaacctaatgcaaatctaaaaataaacttgttggatccagtttgaatgcacctccagtctaacacctcaagacactaattttagttgccaaaaaaaaaaaaaaagccaccattattactttcacagaagctggttttccctaacttccattctttcctccatcaaaattttctttttctctatcctttttcagagggctaattttagtgagctgtcacattgggaagaatctggttcattccccacatggttttagaaaccaacttggatataatggggaaggtcagatccccacggaatagggacatcttcctacctgctttctaaagcagctgagtttggtaaccatgggcaccctcttcagctgggaggccagcaaagcgttacccctgctgtatttaagccaaagaaccacccactgtgggtgtataggtcccatgtagtcaaatctagtttttcaagggaagtaagaaacccattgtttcagtataagatcaccttaattaaaagatttgacaacactggttgagccaaagaaaatgcatccatgtactccattgggaccatgactttccagtttgcaatgtcttgctgaacaacacatacacaatcctttccctttgcatataattctagggagaatttttctgatggatgtaactaaatagtgtgaccatactggcacttacccatcagaagtagtcatttttcaaaagaaagattctgccatagtgagctatacaggctgccccggttacttgtttagtctcctgtctcccctaactgatgtccagccactgctactaagggctcttccagcattgagtagggtgtagtaaacaagcagggatgatttgttgaattaaaataagttctgccatcacttaatgcagttttggaagatggtttaaagatgatttgggaaacagattaaaagccactggtgacaatcagtgtcactattttcactcttatcttactttttataagaaagttattataggtcaatttttcatctgtaatcacatgccaaaatgtcacaatgttaggctccaaaagacttctggaaaaatatatttcctaatgtatttttaaaatgtgctacaaagtagaacattgggatagcctcattgtcagtaaaacctgccagggacttggaaggcaattctgataaagagttacagagaatttagcatattgaaaagcaacattaaaagagtatgtaggcaattattttataaggatcagcatttattcaacaaacatttttaaactgtttactgtgtataaggtatgtggaattagctgctggagggtgtcgaatgaagattttacgtttcaatgcatttattattattattcattggtagtattccacaagcttaaaggttttatttgttttatgtcaacataaataacaaacagatgctctctaaaagaaaatggtattatttaagaatagggcatactaaattatgtgcttagtcagggagggaaggaagacaaaggtttgtaaaggataaatgaggagggttacataattgttttcagatgattagccttggctacaaggatcaataacaagagtgacctcagtctgacgttggacagggagttgctaggcaggtgtcctcacagaagtattttttgtgtaaagttgctatggcctttgtacaaggtgatggcttttgcagagtcttttgtgagagtttttcttatcaggcatttatgagtgagaaccttctctttatgacattccctggctctttttgtcagggttttttgggtttttgtgggtgttgttgttgttttaatataagggactccatttagattctgacaactttcacattatttaacatccacatatttactctgtgccagaaacaattctaagtactttataagtattaacttatttaatcatctaaacaatctaacaagataatattatgatccccagtaaacacctgtcttcatctataaggataaagaaattgaagcacagagagttaagtgaactgcccaaaatcacactgctggtaaattgcagggccagaatctgaacccaggcaagctgtgctccaaaatgtgtgttcttatccatcacatcgattagctcattctgtaaaacaaccccaaacttggcagcttataacatcaactagttattatttttcatgcattatctggtcagctgggcaggtctgcagatccagaccagactcatagactcagctcatctcagccgggttcactcaagtgtatgtgctcagctggggactggctggtccaggacatccttgaccaggatgactcagctctcttccagaagagctggatgacagaccaggatgactcagacctctcatcctccattgctataataggaccctgagaaacagtggaaaaatttgcaagggtcttttgtatcaagtttgctattctctgattaaccaaagcaaatcacatggtctggtccagagtcagtgtggaagggcaccaccaacgggcatagacataggttggtgtaaaaattggagactttaatacaattaacctcccatagtcatggctcaacactatgctgttttaaccctgctttccagggagtatcaaatttgatatttccaactccaaaagaattgtgaagatgctataaaatgtagccttgttggtttaggaaggcaagaaaagaataaaaagaaatgtggaaaatgaaaggatatttataattttaggctgatcctggagaaacaccatcagaggctccaagtgaagcgagaacgactccagcagaaaatggggtgaatcacactacaaccctgacacccaagccaccctcccaggctctccacagccagccagctccaggtaagccatctggaaagagctggacaacatgagcaagatcctccagttcattagtgccactgacggaggcgctgtgatgtgggtagctaaagcatcaagtggggaaagatgtgtggacttaggaggagctccgtcaatgtgcaattaatgaatgaaagccagaagagagtcatatgtgctcatctggctctacagataacttatgaaaccacaacaaaaaaaatcacccagatttccggtgtcctttttcagtgatgagttatgacccatctgctggcacagtttgagaagaattctccaagcagcttataaacaaccatgccttagaagtgcattcttagtcttgcttcattaattctgtgccaagggctcctttccctctttctccaactttcttttcaacatctttgagtgtctgccctgtgctggacacattgctaagcttttcatatggatcatttcaattccccccataccaggcccaagagtagattctattattgtccccattgtgcagatgaataagctgccattttcaggtgataaagtacttattgaaggccacagtgccagggaagagtgaccttaggcctgatgcagttcccaatgatactaacattcttgcttttagctcctatattacagccaaagccacactcttgtctcatttctcaaaatgaataaatgaataaataaataaataaataaataaataaaataaaaatcctttgatttctacgcagctaactttgacatttaatcttatgcagctttgtgtaactattccttgtgtgtatgtcctgtttaccccagtagatgggaggcttcctaggtagacttcaatttgatgcctcctctgtacatcacacagtgctggggaatagcatgtacctgataatttcttgttgaattggttaataaagtaaacaaaagggagcagaatttccttccatgaaggtgtggaaaggagctcctttctttgtcatactagatcagggtgccagtagatccagatcttttaagggtatttctcatgggagagaaagagaattaaaaaaaaaaaaaccaattatatttaatttgtatcagacacgcttgaactgctttttaaaaggttgctggccaggcatggtggctcatgcccgtaatcccagtactttggaaggttgaggcaggtggatcacttgaggtcagcagttcaggaccaacctggccaacatggtgaaacccccatcgctactaaaaatacataagttagcctggcatggtagtgcatgcctgtagttccagcaactcaggaggctgaggcaggagaattgcttgaacccaggaggcggaggtgcagtaagctgagatcgcaccactgcactccagcctgagtgacagagcgaggctccatctcaaaaagaaaaaaaaaaagttgccaaagtcaataatagtaagaagatgacgttataaacaagaagtaaattttcaaataaagagttttatataccaaatacaaacatcttgaatgcttctgaaatataaatccatcatttaaatgtgtgagtaaatagtcatgtgttcctgaaagtaaaagagaatttagcattttcacatttaatttttttaacttgatattttggaataattgaacttacagaaaatattttttaaatggcacagaatacattgcaaaaataacctcttcttcccctaaagttaacatctcacgggatcatggggcaatcatcaaaaccaggaaagtaacattggcatgatactctgacctaaactgcacaatttatttggactaacctgctttctacagtaatgtccttttactgttcaagattccaacgcaggatcccaaattgtattttattgtcatgattctttagtctcctttaatctatggcagtcccacagtctttcctgtctttcataaccttggtactttggaagaactctggtcagttattttgttgaacatccctcagtctgggttggtccgatgtttccccatgattaggttgagggcatgcattttgacaagagcaccatgcaagtgatactcgcctttctcagtgcatcacatcacggatatatgatgttgctgggtctcatcactgatgatatgggatcacttggttaaggtggtttctccactgaaagttattattttcccctcttagatatattgggagagctactttgagactatgcaaatatcctgttcttccttaaacttttgcttactgatttttaacattcaccaatggatctttcctgtaacagttattactgcctagtggtcaacatttgacttttatttttattttactttattttattttgagacagagtttggctcttgttgcccaggctggagtgcaatggtgtgatctcagctcactgcaacctctgcctcctgggttcaagcgattctcctgcctcagcctcccaagtagctgggattacaggcgtgcaccatcacacccggctaattttatatttttagtagagacggggtttcgccatgttggtcaggctggtgtcgagctcctgacctcagctgatccatctaccttggcctcccagcgtttgacttttaaaaggtcacttgtcattcctgatttagccagaagatggcgatagcattgcctaaactgaatttgttccaagtggatgtcttttctcttttctctcgttataaatggggcatataatatcacattttttttttttttttttttttggagacagactttcactcaatctgtcacatagggtggagtgcagtggcatgatctcagtccactgcaaactccacctcctggcttcaagtgattcttctgcttcagccaaccaggtagctgggattacaagtacccgccaccatgctccgctaatttttgtatttttagtagagacagggtttcaccatattgccaggctggtcttgaactcctgacctcaagtgatccgcctgcctcggcctcccaaagtgccgggattacaggaatgagccactgcacctggcctaatgttacatttaattaggtttgtctcaaagctgcaaatgaagactttttaagaataatttttataaagaattttctcacacaatttgtcatttctctgaaaagagatttagattcaaggcccaaatatgtttgtttgtttacaggaagaataaaatttaaaaagttgaagaggctatttattttatcttttatattacaggttctgtaaaggcacctgccaaaacagaagatcttattcagagtgtcttaacaggtaaatgccaccctttccccccatggaattaagcagctcagtgttacacagtggaagtatttagaggagaggaaatttccattcatatctgaaaaacaacatcattaatatttcttcttctaaaaaatctagagacatacacttttagtttagtctacatgatatgatataatcacagagaagtaaccatactttgtagctagaaccctactggcataaaaataatgtagtttcacaagatagctatttcagcatcaaagaatagtttcatgctggaaatgtaacccagtgaacaagaatgcctgtcttcccaaattgccaataataaactatattttagatatgcagaatatgatccatttgtgagcataaaatgcacagtgtttaagaactgtgatacagtttggagttattttatatttggttagtcacataaactagtggaactaaaattggtacaagctttgtgcagtacaattagcagtatgtagtggaatcttaaaaatgtttataatacttggttcaatatacaacagaaatgtacacacacgttcaccaaaagcagcaccactggtaagggccaaatctagaaacaacccaatgtccatcagctgtaaggtaggtaaataaattgtgataaattcctagcatggaacaggaggcaactgcaggaataaataaactcaagtcacacacaacatggataaaactcaagcataatgttgaggaaaaaagtcagacacaaaagaacatattctgtaggattccatatacaccaacttcaaagacaaaactaatctgtgctgtagaaacctggatttggattatacttggtgggagacaggaaccaaaaaggaaggcttctgggatgctggccaaattctaactttgacctaagtgatggatattgaagcacattgactttgggaaaatttacaaggctatacttttatgatttatgcactttgatgcgtatatttgcatttcatcaagaaatgcataaaatatgcgtagaaaaattacttgaggaaagtattaaaagaaaacaaaacatggtttggttttgttttgtttttgagacaaagtctcactctgccacccaggctggaacacagtggtacaatctcggctgaccgcaacctccacctcccgggttcaagcaattctcctgcctcagcctcccaaatagctaggattacaagcacgtgccaccacacccggctaattttgtatttttagtagagacggtgattctccacgttggccaggctggtctcgaactcctgacctcaggtgatccacccgctatttttagtagagacggtgattcgccacgttggccaggctggtctcgaactcctgacctcaggtgatccacccgcctcggcctcccaaagttttgggattacaggcgtgagccactgtgcccctcccaacaaaacatgtttttaaaagatttagttctaggctgggtgtggtggctcacgcctgtaatcccagtacctggggaggccaaggggggggcggatcacctgaggtcgggagttcgagaccagcctgaccaacatggagaaaccccatctctactaaatattacaaaattaaccgctgtggtggcgcgcacctataatcccagctactcaggaagctgaggcaggaaattcgcttgaacccaggaggcggaggttgccgtgagccaaggttgcgccattgcactccagcctgggcaacaagcgcgaaactctgtctcaaaaaaagaaagatttagtttcatgggaaacaacaccatattaatgcatacaacaagagacagcagtgttcctagaatgttgtttaaaataacgtaaatgaatggacaaaaggcaatggtctgtaccaatacattagctgtgattatatcttggtggcttatttataaatgatatttgtgtctttatataagtgagcattacctttatacttaagagcatagtctaaggaacagcctctctcatctacagactttttaaaaataatagtttatgtggatttatttctaatcgtaggttagaacatctagagccttatttccaaactgcctatagctgatatgctgtaaaccacttttaaagaaatagaattgcatctgcctccaagaatgcagcaattccttgggattataaattcttaatgtaataatttattatgcaaccataatgagtcaatttgggcctgaaggaaaccattaaataaatgtacctggttttctccatggcctcattctcaaaagagatcgaatgtcaggagaatagacacagtataagaaaaggaaacatatttctattgcttaaagaccttaacatttaataacataacttattattctagtctcaatgtttattcactagacatcttattttctattcaggtctcttgttattcacagcatatattatttctgaatctcttgatagtttcaaatatttatggtaacattttttgttcccagaagcaggacattcaattcaaaccatggaaacatgtgaactatgacttgatctaggtccatataaatgataattcactggagttaagataccatcagttgtaaagcatcctacgttcatgtattgctaaaaaagaaaagcactgaccaaccatcataccccaccaaccataagatgcatcttgatttcggaaatgttaacatattttttaaatgcacattctagaattgattgaatatatcagtaaaatacagattagttttgttttgttttgagacggagtctcaccctgtcgcccaggctgcagagcaatgatgtgatcgcggctcattgaaacctccgtctcccgggttcaagtgattctcctgcctcagcctcccgagtggctgggattacaggtgcctgccaccacacctggctaatttttgcatttttatttatttatttatttatttagagacaagagtctaactctgccacccaggctggagtgcagtggcacaatcttggctcactgcaacctctgcttcccaggttcaagcaattctcctgcctcagcctctcgagcagctgggattataggcatgtgccaccatgcccagctaatttttgtgtttttagtagagacaggagttttgccatgttggccaggctggtctcgaactcctgacctcagatatccacccaccttggcctcccaaagtgctggacttacaggcatgcgccaccacacctggcctaatttttgtatttttagtagagatggggtttcaccatgttggccaggctagtctcgaattcctgacctcaggtgatcctgcctcggcctcccaaagtgctgggattacaggcatgagccaatgcacttggcccagaatgttttaaggtcagactctatcacattcaaagttttctcagcatgggataaaaaaatcagccaggcatggtgactcatgcctggaaatcccagcactttgggaagccgaggagggcagatcacttgaggctgggagtttgagaccaggctggccaacatggcgaaaccccgtctccataaaaaatagaaaataattatccgggcatgttggtgcatgcttgtaatcccagctacttgggaggctgagacatgagaatcacctgaacccgcgaggtggaggttgcagtgagctgagatcacgccactgcactccagcctgcgcaacagagcaagactctgtctcaaaaaagaaaatagtaatcataatcataataatatagtaaagtgggctgctagtaagcctctggtgactttgtgcaaattatattaaggtatcttccctcaagacactttactgctatatgcttttatgataaatgtaccagcttatgatgtttatactgtaaatgataccttttagaaatgatgttgtagaacctgcacagttattttctaagcctccacaggcacagtgccagaaactgagttaaatactttccatgagttcttttatttcatcatcttaacaaccctataaagttatagaagtattataatccttatagcaatgctgttggtgccctgcccagattccttgtacagctggtgcacccgtctcctggctggtggtgagggttggctgttaacagctcataacttctccttctctgcaaaattgccctcaaccaaaaggaagccccctctccagatggttatgcctccctgcactgaatgttccaaatatgcaagaagcttgccttcttgcctcaagatgagaccagctcagtggtacaactcacactccagcacttccccatgggatcaggcagagaccagactccatccttctgagaccacacccttgctcagctccttccccagccccgtctgctttcctggctcccctactctgagagtccctcagtaaatcacgtgcacctgaatccccatcttgcattctgcttctagggaacccaaactaaaaatatatgtattcgaatgaagcaattgggtctctgagaagtttagtaacatagtctcaaagttagcaagtgatagagccagactggaacccaggtagagctgacatcaagctttgctcttaaactctagctgggcaagatcaaccatttcttcctaagaaggtagccgctcttctttccatctggatgttcagccctcccattcccttagctttcatattcatttgttgcagaagtggaagcacagaccatcgaagaactaaagcaacagaaatcgtttgtgaaacttcaaaagaaacactacaaagaaatgaaagacctggttaagagacaccacaagaaaaccactgaccttatcaaagaacacactaccaagtataatgaaattcagaatgactacttgagaaggagagccgctttggaaaagtccgccaaaaaggacagtaagaaaaagtaagttcaatgaatatttttagttggtttcatagcatgaagagttgttaacatggatttttaatgttttatatcatatttttggacctgtaccatggcaagaaaaccacctaacctccgttctccatagcttttgtggcaccttagcccagatttgcttgtgaattgaatttttttatttaaccaaattctgagaataaatatgcaggaagtcctcctgtgagtctagcctgcgatcccaattccagttaactaacttcctatattacagctgccaatctcatgggtatgagactttgcctggagtacctagaacctagttggagaggcagctgatttttttttttgagacagagtcttgccctgtcacccagactggagtgcagtgacatcatctcggctcactgcaacttctgtctccagagtttaagtgattcttgtgcctcagcctcccaagaagctgggattacgccactacgcctggcgaatttttgtatttttagtagagatggggtttcaccaggttgcccagctggtcttgaactcctggcctcaagcgatctgcctgcctcggcctcccaaagtgctgggattacaggcatgagccaccatgcctgcccacaactggtcttatagaaaagagaagcttactatcctttgctaccctgtctgaaatccataatgccctacacaggtgactctaatttgggcctgggttcccacagccccatatacccaaaccttgatgatgagaagcatctctcacacattcacttaattaatattttttgagtgcctactgtgccctggggacacagcaataaacatgacctacccaatcatctcaaatagtaacatggtaatgtgggaaacataaataataaacaacaaacacacagcatcatctcaggctgtgatgaggactatcaaggaaagaaagaaacaggaccatggggtagagaatgactggagataggagatcccttctgacatgttgatctgcaataaggtggcacagaaagaataaagcctggtcagctatggaaagaactagggagacttactccaggctgaggaaacagcaagtgcaaaggccctcaggcaggaaaaaaatgtgcttgtgccaggaacagtaaagctggcaaagtgggtgaaacattgtaaaccatgagaggagtgaaacaggatgagatcagagaaacaggagggaatcccactgctaggttctttagagctagagcaagcaacagttcaaaatgtatcgaacgtgcaataagattctactgaagaaagaaattgatatggcgaaatttgagagtctcagagcaatgactctagctgctgtgtggaagagggaccctcaagctgtgcatctcaaatggacatgagtcactggggatcttgttaggtgcaggttctgctccatgtctgaattggggcctgagcagcaccaggtgatgctgattctgcagttccatggacaacactctgagtagtgaagatcaaggactcagagtgaaagcaggagaccagttaggaaactttttcatgagtccagctgagtaatgatggtggtttggtctaggatgacgctggtagacatggagagaaggggatgaattcttgatttgttttaaaaagatcgtaaaatatggggtcagaggcctggaagagagaagcctgcttgtatgtctctgcaattcccaggtgtcctttagagaatgaaactcatgctgttacccacaccaaatgtgttcatgaaactccattatctagcctagatcagtgcatctcaaatttcagtgtgcatgtgaatcacttgcagcatttgctaaacacagaccctcgggacctgaccctagagtttctgcctcaggggcctccttcggtagggactgagcttctgagcttctaacgagctcctaaggtttgctgatgctgctggtccacagactttccactgatgggccctggtctataatcattcaggagcatcctagaaattgaagggtggctgaaaggctttctttggtctaatccctgcctcccttcccagctgccatctcccagcacttcatatgaaaacctgtactttctgccgagttcccaccatgatgagatagggcagttaggattctctgggctcagggcccttcttcaattgcaagactcttgtgtgaacaatgcagacgctgcctctaaactccaacaaagacctgcttccaaatgtgaggttgccgtgtggatttcagagtgtcacccgctctcagaaccccacatgtggactgcgcatcatagcttatcatgggactttgtggacacagggtctggcggaccacagggggcttcctctcttgaaccctgtcgagggctgttcccagttctggaatagcatttcattgagtgtcaacaaagtactgggcatatgtgtcatatcagtttcctaggattgctgtaaaaagtacagcaaactggatggcttaaaacaataaaaatgtattttctcacagttttggaggctaggaattcaaaatcaaggtgttggctgggcgcaatggctcactcctgtaatcccagcactttgggaggctaaggtgggaggatcacttgagaccagcctgggcaacatggtgaaaccccatctctactaaaaatatgaaaattagccaggcatggtggcacacacctgtaatcccagctacttgggaggctgaggtaggaggattgcttgaaccaggagatggaggttgcagtgagccgagatggtgccactgcactccagcctgggcaacagagaaggactctgtctcaagacaaaacaaaacaaaacaaaaaaacaaaatcaaggtgttagtggactatgcgctctctgaaaagtctaggggaagaaacttttttttttgtttcttctaacttctggtggttgctggcaatctttggcattccttggctgacagacatatcactccagtctctacctccattatcacatgaattctccctgcgtaggtgtgtcttggtccaaatttccctcttctaatgacagacaccaggcattagattcaggtccaccctaatccaccatgacctcattctattacatttgcaacaacctctttccaaattagatcacaggctgaggttctgggcagaacctgaagtttaccgggatgttatttaacccagtacatgtgctaatcacttctatgtactattccatatatttctcacagcagcactgtgaagtaagtacaggcatcacccacattggataagagaggacctaaaactcattgaggccaagtaacctggccaggggcacatgcaacacacaaggccatagtgacagtgaggtcatggcgtggtgccccctgagatactacttgtgtcagatgacatagcagatctggaatctgcatctctgtagacctgtgactgcttctggtccgtatacttataatcttctatctctatacaacaaaacaaacagatgcatgaaataaatatgcccaaataaattccctcgttaactatccctaatgttaggagatttctcttctaaatttagattcctgaaatttctttgaatatcttttgcaggtatatagtatgaacttcttgacaataaataatgttttgcaacatgaagttctctaatcaacagcattaatttttacataaaaatcttttcttcaaagttgaataattagggaaatggaaataaatgcagtggatttaaattttgttgctatcttttgaggtcacagacagttcttgtcttcctcagggcttatttagctgtcaagaatatttttaatttcagatatttagtgagcattaacagagcgttgtgtaagacattgctcttaagtatctttaaacatcaactcataacatttttaaaataaaaattaacattttatttttaaaataaaatgttatttgtggttttaaaaaaaagtgtatcgtttagaagacataactttcaaaagcaaaagtatcccttagttctatttctatatatatatatagcattttaatgaattgtagcatcaaaagaagtgaaaaaaagccttttaagtttaaattattgctccacttaattttctatactatagtatataaattactcttatcagatagcctatttttcatatgttggctaaccaatggacaacgtattgccaaagataatccaacgaccttcacagctctaggaaatcttatgtagaattggttgtacatttactgaaaacttttttggaatcattgtcatcagctgtctcagtaaagattatctcaaaagcttgactgataataattgccactgagaaataaaatttcattctttaactgaaaactttattaattaccctgaaactatgtaagtatgtaagtgacctgtcaatgagcaaagtataagacatattacatccttcctttactgaataatcttcttttgatgccaagttatagagataagatgcattttttagatttatattgtgacatatgatttaacacatgcttaaattgaaagcactatcaaaacctaatacttgggctttaaaaagtaataaaatcatctcttttttttttgttttttgtttttgagatggagtctcactctgtcatccaggctggagtgcagtggtgcgatctcggctcactgcaagctccgcctcccgggttcatgccattctcctgcctcagcctcctgagtagctgggactataggcgcccgccaccacgcccagctaattttttgtatttttagtagagacggggtttcactgtgttagccaggatggcctcgatctcctgacctcgtgatccgcccacctcggcctcccaaagtgctgggattacaggcgtgagccaccacgcccagccaaaatcatcatttcttaagcctggaggatccttaaaggccatctaggtgatatttgtcactttttcaaggaggaagctgaaagctaaaggtattaccatttacctgtagttacacagccagttcaagcaaagcttggcctaaaacttctcctgaatttctgctttagtcttatgtactatgaaccccaaaaatctgagacagttaatttagcaagtttatttagtaagttcatttttccaaggttcaggacatgcgcctgtgacagcctcaggaggtccagatgacatgtgcccaaggtgttcagagcagtttgtttttatacattctagggagacatgagacatcactcaacctatgcaagatgaacactggttctatctggaaaggcgggacaactcgaagcaaaggcaggaagatgggaagccgggagggggtttccaggtcataggtagataagagacaaatggttgcattcttctgagtttctgattagcctcttggaaggagacaatcagatatgcatttatctcagtgagcagaggcatgactttgaatagaatgggaggcaggttggccctaaaccattcccatcttgacttttccctttagcttagtgatttggggccccaagatttattttcctttcactgtacatatttgtttattcatttttgtatttacttgtaagtcatatcctgcaaacttccagtagaatattgaaggtaacatcatagaagatttgtatgtaaaaatcccatgaaaatagaaagagaaacaacacacatgcgtagactaagctttggacaaattatctagacctgctgcccaatacaggagccactagctacctaccagtggctcttgagtccttgaaatattgctcgtgagatgtgttataactacaaaatacacaccagatatctaagacttcacttttttaaaaaagaatgtaaaatagctacaacatatctgttgattttaattacatgttgaaatgatattttggatatattaagttaaataaaatatattattaaaattaatttcactcacttatttttactttttaaagtgactactaatagtttgaaattacatatgtgaagggaatcacatatgtggttctcattctgtttctaccagacagcgccagccatttaatgtcatctctgtccttgaacactgaattcagctcttagcttctgagaaaaggagtatgggtttgataattctcctcatctgattaaaggaaacttgctgactcttccaagagagacaagcgttttcctagtattaaattgccagagatttaatttcatggatcttatacaagcagcagaggggataatgccttcaactttgtttttatagaagatgcagagacgttgttcacttgtttttttcttgtgttgtcctttaaaacaaaacaaaaccaaaaaatcccttagtacatagtatctaaagatacgtcatgaggagcttttcttcaagtggcaaagccagtgggtctgattatgtctacctgtcttccatctctcttgatatgcaataaaatcctgaaaacacctcagataaatgaatggatgggcattatgtacattgaatttgtttccttccttccttcgttccttccttccttccttcctttcgacagggtcttgctcttttgctcaggctggagtgcagtggcatgatcacaactcactgcagtctcgacctcctgggctcaatcaatcctcctgccacagactcccgggtagctggaactagtcgcatgccactaggcccggttaattttttttttttttttttttttagaggtggggtctcactacccaggctgactttgaacttctgggttcaagtgatctgcccacctcggcccccaaaagtgctggaattacaggcgtgagccaccagcacaccaggcctgttcctaatactctgtctttccctgtttcctacagatgataatatagagtacaaaattggaatgaatcacaccaatttctttaatattcatcatctcaagtgagctttctacataatgtgaagaacaggttactcaaaaatagttttggtccagacatggcatgcagtcatgctgtgttgctcttaagagcacaggtgttgcccttctgcccctgtaatttttgaccttgggcaagttgcactactgcacctccatgctgtgtccttggccaattatctcacagagccgtggtttcctcaaatgtaagctggtgatgggtataccgacttactcggatacgagtgtgcccggcatatggggggatggttggcaatgagagctacctctgctagagtggttggaactgattgaagaaatgcctttatgccctggttacaatgatttcctgctatataagatcattcaggccgggcgcggtggctcatgcctgtaatcccagcactttgggaggccgaggtgggcggatcacctgaggttgggagtttgagaccagcctgaccaacatggagaaaccctgtctctactaaaaataaaaaaattagccgggcatggtggtgcatgcctgtaatcccagctacggaggctgaggtaggagaatcacttgaacctggaaggcggaagttgtggtgagctaagatcgtgccattgcactctagcctgggctacaagagcaaaactccatctcaaaaaaagaaagaaaagaaaagaaaaaagataattcaatgttaactatgtcatgccaagaggaaagtttccctcaacactgcagtgaggagccttatagaatgtccgtcctcatttggcattgcacataaaaatgcaaaaagaaacttgagaaaattccgcatcccttatttgacaaaatctgattctaacaccagcttcaaccaactcccttccccatgtgatgccactgatgctggcccaattcaaagaaaaagcaaccagaattactgacagctgattctaagaaactttacctggcctatcggaccacaagtgaaaaatatggaggcagagtctgatgtgttgaatgtcttaggtagtctttcgggaagggattccatataaatgaaaagagcatacctactctttgtaccctgttcccaatactctgtctttctttccactgtttcctacaggtgataatacagagtacaaaattggaaggactcacaccataagttaatgataattactttaatttattttgacattcaccctaaccttctaaatatttgtataattctctaagaacaatgcagagaaagtcatactgctaagaggaagcattcgaaatattttagaatgaactaacgcatctctttccccttgtaagctttgtgtggaaagtgccatttgggtaaagatatcagtgaagttggtgaagcctccaaagggccttattttcattgtgtgtctttgctgttaaaaatcttgttaagaggccgggcacggtggctcacgtctgtaatcccagcactctgggaggctgagatgggcagatcacttgaggtcaagagtttgagaccatgctagccaacatggtgaaacctcatctctaataaaaatacaaaaattagccaggtatggtggcacatgcttgtagttccagctactcaggaggctgaggcaggagaatcactcaaacgtgggaggtggaggttgcagtgagctgagatcatgccactgcactccagcttgggcaacagagcaagactctgtctcaacaacaacaataaaattgttaagaaacagaactcagatgtcagccaggagggttatctgcacacggcatctacacgtgctctctgtttataatcatcacccctgatgctaaacaaggcacatctttagcttcctctaacaaagtctgctcaatgcagtgtcctctgaagttttcatacgggaaaggtaactgggaatgccattacacttgtcacattttaaaataacaaaaaagattaaaacctgaaaattttttattagacactgtttttcccaaacggagattattattctcaccactgccatgcctagggcccccagcctctttgcttttctttctgcccctgcctctttctagagcaccatgaattccattcagtctctgggattggagacactctattgctaagcttgtccttggggtctcaccctctaccccaagtggcttatgaaaatatgtatttccaaacagagaactttctctaggaggaattctggtgaataaccttccctccaccttgttatggcctgtctgttttgtgagtcaaactctgtgtctttgcagatcggaacccagcagccctgatcatggttcatcaacgattgagcaagacctcgctgctctggatgctgaaatgacccaaaagttaatagacttgaaggacaaacaacagcagcagctgcttaatcttcggcaagaacagtattatagtgaaaaataccagaagcgagaacatattaaactggtgagcctgagaaacatgatttatgtttgtgcaactggaactcccttataggaaactttggatacttttggataactaaaaggagacaagggtgggtgtgactggcaccaacttgagagattgtttaggtgacacagtgtccatcacactattgtttttataagccccactgtcttaacatctttaccaagcttctctgtcttctgccaataaggctgtattttatcatttttattttcactaacttatgttgagtttataattgcttttgggaatctttgaaatctcataagcaaatagaaaacacttatctttgtttaagaaattaagaacatgttgcaaacaaattttccctttttttttttttttttttttttggtagcactgggctttgtaagaatttttttaaaattatacagtacactgtcctatatttagaaaagtcagtacctaaatggccaacacggaatgttggctacccaattcataaggctccctatgaaaggaaatgccatcctcaccattaataatcagttttattttccaaaatgttttctcacgaattgagacattctctccatttttgttgattccttgatacatagtagggacacaataaatatttgtgacagatagattagataaatttagcaacaaaatatccttgaaaacaagcttatgccaaaaccaaagaaataagtaagcttgatagaaattaaggtagtgtatccagaagaaatgggttttaagagatatttgtataagctgtctatttctttgctgagggtctgtgcatataagagaattctgagcagcttcagcttgtaaggttggaagcctatagatgatttagccatcactgtataataggtgattcagtgtaattctgttgttctaggataacagtccccagtgactgtatgcaatgagtagatcaaaatcacatgaattgcttattgaaaatcaaattctaacgaggcccgttattctcaacttgagcatgaatcagaatcacctggagagcttgttagaagagatttttagggtctaccttaaattttcaacagatctctcgtagggctggtgttttcatatttctgatcccaggaccagacttcaagaactgctgcccaatacctaaatgtgaggctcaggatttactttttaacaagccccacatgatttcgaggggttgcctcatttgtgaactgctgaaataagacgaaagcagtgaaagaatggctgggcaggggttggatcaggcatagggagggattgccttgacagacctgagcaagtcaaagtaaattttaacgggcaataatggctttgagatccggctataaccactgccttctgactttctccagcaactcatccccagtagtccagaacataataaaaattaaaatagtggccgcatattaagcattcaccatggggctatattctgtgctgagtcatttacaggaaacagcctatttaattctcacaataaccattagagtttggtactattgtcagccccattttgcagataaaaaatgtatatagcaaaatttagtgactttcccaaggatccacaactggaaggtggtacatttgggatttgaaccttggtcctcgggttctagagcccctggtttataaccattgtgtagatgcctcggctaattcaggtttcaagccaatgtcatcataatgaagggagttgctctggtgtcctgctcacacagagagcacacagcaaacttcttcattatgatacctggaatgccatgcctgtctctctttaaacagctttatttcccaatcatacaattcactcattttaaagtgtgcagttcaatggtttttgtatattcatagatacgtacaaccaccactagaatcaattttagagcattttcatcgccttaaaaagaaatcctaataaattaggcattcagccattcattcattccttgaaacaaatgcttattagacacctgcttgttaaatatttttaaacagtagtaaataaaaataacaatcctaggctttatggagcttatattgtagaaggatgagtcagaccataaacaaaataagttggtaaaacatgtagtatgttaggtagtaataagggcttaggagaaaaacaataacagaaatgggagaataaggaggggcggtttggggaaggatgatgaggatgcttggcgattttaaatagagtaggcacggaaaggtttacgcagaaggcaacatctgagttaagaggtgaagaactgacaacagccaacacagggaggaggattcctccaggcagaaggattggcatgcaaagactctgggctggaaatgggcctgagtgttgggggaacagcacagtggctctgcctgaagaggattatagggcatcaggtcagagagatgggacttttgaggtgggagacagatcttctggggtctttaggcctctgtgttttcactaggagtgaggtgggaactgttggaagcttttgagcagaggattgatgtgatctgaagaaacttccacagggaccactccggggctgtgcttcccagtacgttacgggaagtggtctcctaggaagaagccgtcccaaagttcaggccaacagcagcccaaggggttaaggaatcctggggtctccagcagatgactcaagtttactaacagggtgaatgttgcttagaagtctggacatcccagctgggtgcggtggctcacacctgtgatcccagtactttgggatgccgaggcaggtggatcacctgagttcaggagttcaagaccagcctgggaaacatagtgaaaccctgtctctactaaaaatacaaaaattagccaggcatggtggtgggtgcctgtaatcccagctactctggaggctgaggtgtgagaatcgcttgaacccaggaggtggaggttgcagtgagccgagatcatgccattacacttcagcctgggtgacagagcaagactccatctcaaaaaaaaaaaaaaagaagtctggacaccccaatattagtccatttccatgcttctaataaagacatacctaagactgggcaatatgaaggaggtttaactggacttaaacttcaccgtgactggggaagcctcacagtcatggcagaagacaagtcatgtcttacatggatggcagcaggcacagaaagagtgcttgtgcagggacatttctctttttaaaactgtcagatctcctgagactcactatcatgagaacagcatgggaaagacttgcccccatgattcattacctcccaccaggtcccgcccacaacatgtgggaattcaagatgagatttgggtggcacacagccaaaccatatcaccgactataatcatctggagtttccccagggccccaacccttgggcaagaccattccccaaggaaagacacatggcaattcagaagagaggtggcagagtgagagggaagcctaatactcacgggagattcctgaaagaggaattcagagtacagatgaaaacagaagccaaaacatcccaagaagacctcttggggagatttgagctgcaggaataggggccgaagtcacaagaaagtcatgcaaaacctaaacatcccaggaacaatgcctcagcatgaggcaccatatggaatcccactgatgagggtgtggaaagcagctcaggagcttttctcctggaggagaaggttggttgggaattggggaaaaccagctgagcttgtaggtgggaaaattgcacttgaggagctagggaggtggtagaaatcctactagaggtggcaactctaccatatgtccttccacttccttctcactaagaaggaatgtgagtacacattgtaaaagttttgaagactgttcagagggacataaatacatgcccaagtcagcctggccctttcaggccaaatgtaagccactcactcaaagtgctcacccctgcaccactgtgattgtggatgtgggtttcagataaagccccagtgcctgttacacacacctatcccagccttgttaggaaggctaaagcctgaatatcttggaattagaaccacacaatgtttattttatggccatttgggagcatttacaatttttactacctgcctttagctgcgacgtgtgtgccaaagcttcctactggctccatttgtaagaatcagagattgttctgtcaggaaatcttttgactgaaaggcacccagaagtgttagttctatctttgctggtggttctaagtaatgaacaggcctcccaggctaaattagacaaaccgaagtgtaattaaaaagtaagccccaggttaaaagaagtatttgggtgatgaggaaaattaagccgacagtatttcatctcccaaaattgctttggggattaaataccaacgtgctttggttaaggattatgcatttcaaatgccacatccacagttcgagagttaagaaagaaagcatggcatccgtaaacttcctgtcagatgtttactgaaaacttagtatttgcacaacattctgatagacactggagacgaaaatgaataaaacacgatcaccacacacactcaggggatgtgtataataaacagtactaagaaatgaaataataaaagcaggaaaaaatggatatgaaagcacagatataactatttgcctaactctatcaatcgataagcacctagaggatatttttgatgtaattgttcatatcatgatacgagatgtaaaatgcacaccaagctctgtagactccacttttgtgcaaaaaaaaaaaaaaaaaaaaaaaaaaaaggatctgtgtccctagagctctacatctaaataactctacagtctggctactcaaagtgtgaagtgtgggccgtgaatcacctaggagtgtgttagacatgcagagtctcaggccccacttcagacctgctaagtcaaaatttgcattttaataggattcccaggtgtcttgtcatatggtcaagttgaagaaacagttttagagtgtgtatcattgccccaaatgcattttagagtaagcctacaatttccgttatttgaaatgggaaatacagtgagctctttacagcttgtcatcaagttgagtgtattatctgttggtgacgaagtcatagttcctgtggaaatcacccctgtggttccctccctacatccacagtagaaggtactggttgctttagtcggaagtgagtgaaaataaagatggaagttcctccaccccattcacgtgcttgtgctccatgatatctctcaatgaacagcttgggggtctgtaaaccccaggtaaggacttttgctccagagaagaactacagggtcagggaatctgttctaattcatttatctgtttttcatcaactgctactggttaaacctgtgtttcgtctataccattagggtgaggttttaattttaaaagtgactttggtgaggcgtggaaattcttagggatttacctgagggtccccaatcactctgggtactcagctctaccatcacattctactaaacacccacagcccagtgagcagggatttcgttgtaatgttaaggagtttttgcttctcagccacagatgtgctcgacccaccattttgtcttctttcttcttcctcctttttagcggctttacaaagagatttcctcatttctttcacagttaccgtatgtgttatcctctgcagagccttgctttgcttcactttgctttgcttcctgtcttttctcccctttcccatatctcccacatgttctaatcacatccattcacctctttctttacatcaaactgaatggctcgcgttcttcttacaatcctcatgtctgtcccaccagcaatcatttcaggaccccaaaccaacgttagtaccatcaaactgagttcagccccagaaagctaaaaagttgtgtttcagaccgcaagctctgggcagatacagatcagctatgaatggacgagcccaccaggacaagcaatcaggtgctgagtggggggtctagggtcatatgtcctcatttcaggccactgctcctccaccaagtcactgcatgaccacctgaatgtcaattttctcacctgttcaatggagataaaaatatctcttacctcatgaaactgtaaggaggaacaacaagataatgcacctaaaatattgtttttaatgaaagcctttttctgtacaatacctgaattgactaggaaatctatatgcacttcaaatataaacaagtattacagttttttatatcttgctacagcttgagggaactcattgtctctccttgaatgatttctaccagcactatgtgctctcccagctatctgggagccacacttgaatgttctcctttctgtggttgcctaggtgatgtatatgtgccaggagtaattgcagtctcaggaagtatccctactgtcagttgtggtagtgccatctgtcttcctccaatatttggactttacatagggtcattttttttttgaaaaataatttagctttcccaaaaaatgttgcatttttctactaaacaagaaatgacaaataagcaaaagatgttagtagtgaaataagaaataaaataattgttgacatttttgtcaattttcctgattattaccccagtgggattcacacacacaaacacacacacacacacacaaacacacacacacacacacacacacacacacaaagatccaaatccatatagttttcaatttgcttcttttacttagcattatgccatggtgatttttcatgtcatgctttttaacgctttttcatggcttcgtattactttattgcatgaatgtagcttaatttatttatctagttccctactcgaggtggtgtattagtccgttttcacatggctgataaagacatagccaagactgggcaatttatacccaaactgtgaggtttaattgaactcatagtttcacatggctggggaggcctcataatcatggcagaaagcaaggaggagcaagtcacgtctgacgtggatggcggcaggcaaagagaacttgtgcagggaaactccccaatataatactattagatcttgtgagacttattcgctatcacaagaacagcacaggaaagacccacccccataattcaatcatctcccaccaggtccctcccacaacacatgggaattatgggagctacacgatgagatttgggtggggacacagagccaaaccatgtcaggtggcaactccacattgaatagaagccttggtcagactttcacattcattttttctttgctcagcaaggaaaaaaaatttcaaagattattataacattgagactcaaataagcagctattttaatataagttctatttagctatggaaattttaaaaataagaattttataggtgtgaaagaatatctcatagaatgatcaagatgcttgacttttttgtccaagactttctccttctgaaaagagaagggagctagtagagattatagctctgggtagacagggccctctctgtctgctcacagaggaaggttggaccatcaatactagcatagtactggcacatagtaggtaaatattctttgaatgaatggtcaggtcacactcccatataaacatcttccttgtttttgcttttgtttttgtttttttagagaccaagtctagctttgttgcccaggctggagggcagtggtacaaacttggtgcactgcagcctccatctcctgggctttagtggtcctcctacctcagcctcccaagtagctgggactacaggcacgcaccaccatgcccagctaattttctctattttttaagagacaggtctcactatgttgcccaggttggtctcaaactcctggctttgagtgatcctcctgcctctaccttgttttcaaattgttggtgatgtgcttgctgtgtagatcattacttagttcagatgttttgtaaattaatttcttgtagaagaaaaacaatgtatagtgaaaatccagagtaaatgctttgactaaaaggaaagaaagaggcatcttctttagacattagtggaagggaaaggaagatgtgttgagcccgaaatatgaatattctagacttggctttttgcctatgttccaagattatccttcttagaagagactccaaacatacaaatttctgtccacatattttttatcccttttgagttagagtcaaggaattattctcctccatggaaaccattttcttgccctcagatgactaaaccaagtgaaatttagcagagttgagaacaagcgtgaagttttattccccagggcctttctgttaactccttaaaaggtttggaacattgagctgggagagttatcatgaatggcaaacaaaccagcaaaaagtaattgagatgtgtctgttcctttgggacagaaaagaaaatcataccaaaagtgaaaattaaatgttgtttactaccattcagtttaccacataccttcttaatttatttcctaggaagtccaagtgaatttttgcttcttctctacctttaatagtcagtttactttcagagttttgtgactaataaatgatcgaatggctctttgaacagagccagcctgctgataaatacaccaaaagttagtataccttgcctttatgttagtcacaaagcacttcaattattatatgaaaaatcactcttctgggtactattttcacatcttatgcagtaagaactttgagcccaaaacacagaagtttatcttgtttagagattaagcagagttgttttatttctgtttttgtttgtttttattttatccttattcttttgattgcaagccacagaattccatgctggactaacttaggccagaagggtatatactagaaaagtacaaagggtatatcacataagaaagggggctgtccaaactctgcccctgcttttctctgcatattagtgttattcttttccaaagtagcaagacaggcttccccttgatagaaaatacaggcactgatcccttctgagttttatttctccattgacatgtaggaaaaatcttggggaaaaccttgtttgggtcccatgatgaccaagtctgcaaccagaagtcagagtatgactgacccaacttggattaatgcctcccctggaccaattatcttggccaagagatggggggtaaaatatacagcagctcccaagggaagcatgtgggtgaggccattctcagaaagcagaggaagttcttcctggagaagtagttagtattgggtagagaaaactacaggtgtacctcacatcctctctttgtagcataaaaaagagataaattattgatgcccatataaaatcccattgccaatttaatgtgagttgggcggtagtggcatactatttaatattaacaaaatcataatattaattattctgtctcctggaggttcagtagacaaaatttaaataaaaatagtaaatgccgtgtgggcagaacttcagtaggagtgagggtcttctgaaaactagctgaggtcgggctcggtggctcacacctgtaatcccagcactttgggagactgagaagggcagatcacgtgaggtcaggagttcaagagcagcctgggcaacatggtgaaaccctgtctctactaaaattacagaaattagctgggtatggtggcacacgcctggaatcccagctattcgggaggctgaggcactacaatcccttgaatccaggaagtggaggttgcagtgagccgagattgcaccactgcactgcagcctgggcaatagagcgacactgtatctcaaaaaaaaaaaaaaggctgagatgagcagaggtggggctgtgtagtaaggcactgtgggggagatgaaggcaaactgagtacagtaggacatttacatattttacatattaaacagatatcctctgaaaacatatactccttgggattctagggaaacaccattttcatttaattgcatgcaaaagcctcagtttaaaaaatacacctggatttcacattaagatgctttttccggaaggaacaaaatttagcttgttaaacaccaaacctatataattttaaaagtatttccaataaggcagcctgtggcttgaatgtgagctttcagagctatcgctgaggtcgggtccagtgtagttttgaaacttaaaagatttcattcacaatcatttttttcagtgcctattttgtctagagcctgggattctaaacatttattaagaatggaaggttgaaatggtgacatccctttgtgggagcaataataagatatttacatacaaaaggtatgtctgtaaatgataccctgtaggaaaaaccaattagggggccaacacccagagttatctgggcagtcaaaggggagaattacctaaggctggcttagaaagggaaggggcagagagaaattgaaatggtttcttccagattgtctccatcttccacaaccaccaagacaatgcttttcaaactctaatgtgcactcaaatctcctgggaattttgttgaacatgtagattctgacttagttgatctggagtagggcccgagaacttacatttctaatgtgctccctggtgatgctcttgccactggtatgtggactacactttgagtagcaagatctagaaagccaggtcatcagctcagagtttctagaacagtgcctgctatttagtaggtgcttaataaatatccattgcatcgtggctgaatcagatagtttagataagtgtgtgttctgggaccacaggaggtggaaacttgttctgcaaggggtaaagggcaaatgcagggggtgtgatgggagccaagagggaggcaaaaggacgtggcagacagggaacttctggggagtctggagggagtgtggcactgacagtggtgtggagcctgacaccaaaccaacataaaagtcagaactgagtgggcagaaggtctgtgagttctccagcttagtctcaatattgactggaggccgatgctgctgaggataaaggcagtaggcggaagggaaacagcacatgtgagcagatgctggcataatcaagaaaatattctgaagtcaggtgaatgatagagatgaggacatggaaacaggaatataattgttactgaattcaaaagagttgctgggagacttagcagtggcttgtagaatgagggagggtccaccaagacaacctcccacttcaagtctggcacaaagcatccaaatcacctcaggagattttgagaatattgattcccaggccctacccctagacatttggagtccataggtcctggaatctgtatttttaagaagttcccccacatgattctgatgttgcagccaaggaaggtgatccctggataactctctgtaactccttcaagtggttggaagaggagaaaagccctctagggaagggaaggtgctagtgagaggacactttcagctaaatagagacgttgcaggagaccccaaggaaatggccagagtctttgcacactggaattttacatctagacagcttgataaatggcatgactacaaagtaatgcctcatgatttctttaattgtgataatcatgattaggcaatcccttttgaatgatcaaataggctttctgctggcccaagtcctagttaatatttgttcagatttaatccacttcacagatgaatgcatcaaatttcatgataattttaaacgaatgtggattccgtatcgtaattctcttgcaagccatggaaccttatttgtctgggtttgtacccatctcagccacttaccagctttggggccctgagcccaggacttgagccagatgtgtcagcgtgttcttatgtaaaacaaaaataataacaccaaccgcatagggcaattctcagaattaaataaatacatgtgaatcttttttgttttttttttttttgagacagagttttgctcttgttgcctagagtgtgcccagagttgctggagtgcagtggtgcaatctcggctcactgcaacctccacctcccggattcaagtgattctcctgcctcagcctcccaagtagctgggattacaggcacccaccaccaggcctggctaactttctgtatttttagtagagacagggttttaccgtgttggccaggctagtctcaaactcctgacctcaagcgatccacctgcctcggcctcccaaagtgctggaattaaagtgtgagccactgtgcccagccacatgtgaatcttttaaaactaggcctgacatatagaaattatcagttaaagtgttgtaggaccctatccttagttcagctaaagacgggttccttgtcacatggccacaaaaagttaggcttgaaggcaatttgaagagtgaggaggacagggttttattgtgttgaaaggaaaagagggaaacaggttatctccacaaggctggagtccctgctagtgtgcttcccaccttgcagattgaattccaagttccacccaggaagaggagtggccaggctcctccctgctgcaaatggggtggatttctgtggctccacctcagtgtgcattcctcccagtgagcaggcccgttgcagtttttccggggactcccttatacttggctgtctcaaaagtttgtggtattatgatttgtcttgtcactattacagctgccacttatagaagactagtcaactcagcttgccttatatgtttttgggaaagagaatctccatctatgggaaaagcagtgggggctttcagaggatgtccacactgtctattgggtgctccagtaagaagggttgagtccagttgctacagccacctgaaaaccttgcagaaggttctccaggttcctcatgaggaaaaaaggaaaagattaccaggcacaattacctttatgtaattggcaaacacttactgggcatcaagtgaatattaggaattgtgcagaataccaaggatacaaaaacacaattgatgcccccttggggcttgatttgataatagatgtatgacaataaatacttgcgttcacagtgatgtagtgacagttcattgaaagcacaaagagaatttctgatgttctttatatctactggaaattacccacgcaagaacataaatgtcaacttctaagatgggaaactcatgttatcctcaaagcaattcaacaatgaatgatagttgtgagccaagaattataacttgctgttgattataacttacatttgtgtcatacttatttttattttgagcttcacagcacctccaaagacataaagacagtgatcaactgagaaaatgtaggttctgaaaatgtagggtcttgccccaaatttcacttttaataagtcttagggtagagattggaaccaggttctacactgtaagttgtctttgcactgagctgggctataataactgccacaacaatctaatgaattctgtttaattaaaaagagataataagaagaatttcatattaaaacccataagcctagataatatgatggttctaaattgtcctcattgccaatgttagatgtctgacaactttaactattgtgaaacatccatcacagatattctaactatagattctgttgtttgagggaggtgggaaggaagctctgtttgcaatcatttgaaatagcaaactgacattttctttttccagcttattcaaaagttgacggatgtcgcagaagagtgtcagaacaatcagttaaagaagctcaaagaaatctgtgagaagtaagccctcattcccattacaattgacatgtgcatctgaatttattcaacacaaattcccatctgatttgcctcttttttctcttttacttccattgtgacttcagagaaaagaaagaattaaagaagaaaatggataaaaagaggcaggagaagataacagaagctaaatccaaagacaaaagtcagatggaagagtaagtcaaaagtgtcccctctcccaaacagttcatctgggaattattttattttgtacgtcagagtcacaggttcataaccagtcaaagactccttcgtgaagtttctcctctagtcagcctttcaaaagattcttttggtaaggtttttaacagggaaggctcaagcaaagactggttcaataaaggagtgaggcacacccagggccttttagataaagagtaagcaaagagcttccctcagggaaaggctaaatcctcacttcctacccataatcttcctggcatttagtgaaaacagagcctgtgccttgggaggaacctgacctttgtccaaaggctggcagattataccttccttgtagcagtaataagaatgttgctatggctcacacttgtaatctcagcactttgaaaggcctaggtgggaggattgcttgaggccaggagttcaataggggcctgggcaacacagggagactctgtctctacaaaaaaattttaagattagctgggtgtggtggtgcacacctatatttccagctactcagaaggctgaggctggaggatggcttcagcatgggaggtcaaggcttcagtgagccatgatggtgccactgcactctaccatgggcaacagagcgaaaccttgtctccaataaataaatagataaaaataaggaaaaaagaaaaagaatgttgagagttctgtaaccttttatctagaagtctgagattaccatttgtcaattctggatgaattggtataatgatgtattcatcatttgcttttagggagaagacagagatgatccggtcatatatccaggaagtggtgcagtatatcaagagggtatgtgggctcatcacgctctctcctttgcaaaacatgtgtgaacatttggtgagctcgctgtgagcttctggaaggaaatgtcatgccttgccataactttttatcactagcacctagcagagctgtttcacagggtgggcactccttaatcaacatttctgcaagttgaattgcaaaccactttgtaaaaggattcatctaaaaatagagtcaagtcatttccaaagtcaagagcccagaaacatattgtaaatgatagtgttcccaaaagaacctttaattgtcatcaatgatagagatgatggcaacctcgaagggctgtcctttttttttccaatttaatgtcatagaaatgtttacatatttataaaaaggtaagaacagtgcagtccattgatcaccacctcccacccttatgtttctgtcacctagcttcaacacttactacagtttcctatacttgtaagtgtagttcttgatcaggagatcaaataatcaaatgtaagccatagatctgaaaagctttcggtattttctgaaaacgtgcacttttaaatgtttagatgaaagtaatgtttcttgtaactttcttatagctagaagaagcgcaaagtaaacggcaagaaaaactcgtagagaaacacaaggaaatacgtcagcagatcctggatgaaaagcccaaggtaaacggaactgaattaaaatgaacaattattttatttgatttccatttagtaagagtaaaaccttcctggtttacataagtaccttgtacacagtctcagatcagttcttgcatatgaaactcatgtatctttctcaatgaaggaaaaaatatagcaatattcagtaagcatttatcatcacctggtgagcttttaaaaactgcaaatatgcagaacccagccccagagatttggctttaactaatctggggtatggctcagacaaaggtatttttatagtccgtttcccctggagaatcagagactaaccaaaccttcagtttgggtactactaagtaaacgtcagttctaaatagctgatgtaatgttgtaatgccaccctctgtccagcagaggatgccctgcaccaaaatcactttggtttttatctagcaaaatagtctcataaatcagagaaaagcaaatcttttgtttcccatagtaacagttgattggggctctgctttaaaattatcttatgttcattgtttggttaaaattaattgtcttatgaatattaactttgaatgaactgagtatctgtagatcaaatactttgaggttaccaaatggcatctcagttttagaacattccttccattttgattcatcactgaatagttttctgtttgtggaaattgtgtttttcaattttcctgcgcttctattttcaatttaaaatatctactctaaaaagtactgccattccacacaagcatttctcgagtcctaaaagttaaaaaacgttagttttatttaattgtatgtttcattcaccagtttacttcttatagatttcttatggataattctaaatatattttcatggttctttgtgctcttatgctttcatatttattatataagacatttatttaatatttttaatttctaagtttttagggttggcaatatagattctcaagcaagaattaataattacttagatatggtgctaattcttacgtttctcctataaacatataatgtagatcttctcagccaccctctcaggttgattatgcactaataaagtggaataaattttaacataatttcagaaattgctatactttccaatcagaattgatctttttaaaatgctcaaattatttagagcaaaagatccagtttgactgaaatttaagaaacactttaataataatcagtctcaggtgatatattcagatacatacatttctaatctatgctgtctggttttaaatttgtcattactttgtacactgacataatagaatttgcttatggttgatggctcagctagtttttgtatttcaaaaaaatttaggtaatatggttcttttcagagtttcattttgcttttttttttcatgcgtgttttggttcaacaatgttaactattttacttacagataaaatgtgaatgtaaaatcattaatgtgtttaaattatataactctcagtatcagtaacccatacaaagattttcttgttactgctctaggtcatcatgattaaaatcaacctcagtaaatgtggaagcacccttaaacttcttccctggatataactggacatgaaaagaactaataacttttggctgatttattaacagtcagggtgcattcagctgcaattttacaataagcccaattaaaactggcttcaacagttatagtatttagtaagccacgttactggaaattcagaggtactacagttgtaacagtgattaatttagtggcttaacaatttcatctccaggtatttttagaatttccactgttgttgccttctagatccagaccgtgaactcagtcatgagatggctgccctagctccacacatcataaccttacatgaaaccactcaaaggacgtgcagcaaatgtcttcattttgtaaccctttctaggattgagaaaaaccttcctacatcccctctagctggtgtttcctcattgggtacaatggcctcatattcccattcttaaaccaatcatgggcagtagggtatcactttcatgattggcttagagtaattaagattcactcacaaggctagagagagttcagttttcctcagttccatggtcatcaggtacctgaacaaaactgatattttatcatcaaagaaatagaggggaaatagcaactgggtagacaggttacatacagtgtacgttacagccatgtttataacaattttttgtttcttcctttctggccccttggaaagagatctgaagtgtttctatgaatttttagtagttctattgtctgcgttttttattgtaaataggtaccatgatgaattcctctgtgcttttcttccatgaggttgctccatgaccatctttttgtgtctggatttgaaggttgcccatgaagattgttggttccatgtcaaactaaagcatttcttgagggtttttcttcatggcttaaaaacgttgtgccttaaagctgtgattttattaataaaataataaatcatgactgttaacattgtaggacatggtggttaataaagggaaatgacaatgacaacaggagcagcaatagacagtagagtaaaagaacaaaatcaagtgtgagacatgtgaagaaagaccaaagcacaggacagcaaagtaggtattaataaatgggtggtgaggagaggccaggccagcatagcagtcgctgatgctcctgtaactgtggggcatggatggaaaatacagtaacactggctttgaaataatccctctccacatctagtactgaaacaggctttgaatcttgacatagacatgagggaaattagcaaaagcagaaacaaaacaaggaacaacccaaggaaatgaaactgatcaatagtatctctaaaacaagtccacggagtcagttccattcagtcagataagaaaacagagtgatttcgtgacatctagaactttatgaatggttccattactgggttttggatgaggaacgtgagctgacattgcagcaggtaatattaaagacaattgtaaccttcttatgaagaagaaaccatgccaaactttgccacaggttactgaggagaatagagttcctccctcaactaatttacagatggtatcggggaatctgccccgatattcacgtaggttcttttctatttttcctaagcatcggctggcttgagaaataaagggacagagtaaaaaagagagaaattttaaggctgggtgtccgggggagacatcacacgttggtaggatccgtgatgcccccacaagccgcaaaaaccagcaagtttttattagagattttcaaaagcggagggagtgtgcaaataggtgtgggtgacagacgagtacttaacagggtaatagaatatcacaaggcaagtggaggcagggcgagatcacaggaccacaggaccacaggaccgaggcaaaattaaaattgctaatgaagttttgggcaccattgtcattgataacatcttatcagtagacagcgttttgagatcaactggtctgaccaaaatttattaggtgggaatttcctcttcctaataagcctgggagcactatgggagactggagtctattgcatctctgcagcctcaacagtaagagacagctatgcccggggggccagtttagagacccacccgcaggcgcacattatctttctcagggatgttccatgctgagaaaaagaattcagcgatatttctcccatttgcttttgaaagaagagaaatatggctctgttctgcccggctcaccagcggtcagagtttaaggttatctctcttgtttcctaaacattgctgttgtcttggtcttttttcaaggtgccccagatttcatattgtttaaacacatgtgctctacaatttgtgcagttaatgcaattatcacatggtcctgaggtgacatacatcctcctcggctgacaggattaagagaataaaataaagacaggcataggaaatcacaagggtattgattggggaagtgataagtgttcatgaaatctttacaatttatgtttagagattgcagtaaagacaggcgtaagaaattataaaagtattaatttggggaactaataaatgtccataaaatcttcacaatccacgttcttctgccatggcttcagccggtccctccatatggggtccctgacttcctgcaacaagatgggatgaagttttttaactagaaagtgatcatagctaagtttttgcagacaccaaaagtatgtataggctacatgacatcatatttcttcctgttcttccatttctttcaccatgttgttgtatataataatttactttctcttcatccacttattctaactaatgtaatagtgtgtttcatgttcctaatcttgtcttaacagggaggaagctctttttttacattactgtttgctctgggatattactattttgagctattctgaaccttgatcaacttagaaaatcatatcaatataattttctaagccattggtaaataaacaactcctttgaaagtaacaaacagatattttgtaaatctttcagcaaaagaaatttgaaaagccaatggctcaaagttaacagtttttcagtggcaaagaagtatttattctggctcaatttagagcaaactacacatgaaacctcattcaaagtgtgactttgctagcagtttactcaacaatgggcatgtcatctagagttcccaacatttttaccatcctgcaatagcagtcataggagaatatgcctcaatcaaaatcaggctaaaaatttgtttcaattctgcatgtgagctgggaccttaagtctttctggtcgctatttggtaggggaccaaatgtggccagtcacactggaaaagtttattttagattgtcccactttgtgacatgcactaggatcttttcatgtggagagttcattttttccctatgaaaaaagagattcaattagtttattcattttgtaggtaattttgagggcattggggaaaacagaagtaggtggtccctcgaagcaacttgtacaataaaatattttggcctcaatttgacacaaaatgatgttgtacattgctgcacataagtcccatggaaacttattatgttataaacaacaagagacactcttagaagggaatacttggctcctttccagtagagttctgaattctggagaaacattcgactgcatgttttctagcaatgagatattcgattcagtccttgagtgtatgtgggtttcagttttgtttgagttgtggctttttatgaaatccatagtggtagaattttcaagatggacgcagtaaacactggccagtcttctgactcagtgaaataattggtttcctggggatttccatacctgggtttgccaaagccagtaggaaacatggggaaaccccatctctaccaaaatacaaaaattagccaggtgtggtggtgggcgctggtagtcccggctacttgggaggctgaggcaggagaatcactggaacccgggaggcggaggttgcagtgagccgagatcgcgccactgcattcaagcctgggcgactgagtgagaccaccctgtctcaaaaaaaaaaaaaaaaagaaaagaaaacacggttagtcacaagttgccttgagtctgttgtgaatatgccaatgtttattgatcactttgctgctcctgactctctttataagaagaatcatcttttgaggggaatatttaatgaactatctccataacctcataaaacagtcaataaatgtgtaatttactttttctctgatgcttaatttgtctttgatgcttcttagaacacaggttttctgcttaatttagctcatcatcaagagagaattccgggaagctttagggcattttaattcattcccaaagaacatttcatcatgtagctactggctcttttttttccctccaccaagggaatatagactgattttccttatttcccctctgacatctttgtaacagggtgattgactcatccctctgcttgaagttagtcttgttagacctaccgctgggctctgagacagaaccttaaatgcggctgatatctcctgtgtttgggagagaaaaggcaaacttcgggatttaaaataaaatattttttaaagtaatgcatttgtgcctcctctaatcttttgcggcttgatggggaaatggattcttccttgccagcacttattggatcttctcccagaagccaaacttgcagagtggaaactggctgcttatagacagtgtttctgctcattgtcaagtctcaattaaccacacagtggtttgtttttgtttgttctgtagaagaaaattctttttcatttttgtcaatataaagaattgcctttttaggaaacaaatatagttatgccttattttcttgagtataaaacttagacatgtttactctccttctgggcaataccagggcattggaacaattttaattccactggtccctcatcagtttatttttgaaatttaatctaatagacttttaaacacataagacattattctatgttttgatcatggttcatttagatatgtctacatattcacatattctttgtgaaacgttttttcttgtatcttctgcccatttgggatcatcatcttgtacttcctctagaagttcctttcatgcggtctactggtgggaaactctttggagtttttatttttgtttttgtgcagaaatgtctttgtttgtttaatgtagtaatagatgagaatctacatttcctccattctggaatgatattttcactggatataaaattttgtgttggtggttattttcctttagcacactgaagataaacttccaccaccctctagcatctattgctgttcttgagaggttaactgttagtcttaatacagttcttttgatgataatttatattccccctccccccaccgacagcatttagtatttttttcttacattttgtgcagtttttctatagtgtgtctaaatatgtgtttgagatggctagatggatcactttcctcagttctgcaaaaactctaaactatcatgaaagcaaatatggcttctgtcattttttttctttccttctaagattccatatatatttgcatataaaataaaatgaacctttttactccatctcctctgtcaatgaattgtttttagtattttccatccttcgtctttctttactgctctgtgggcaattttttttcctacactttttgcaatgcaccaattttttgtttaaacttctattctatgcatccactgagtgtttaatttcaggttttgtattttatttccagatgttctatttggtttattttcaaatatataatctgtatgtcttagcttgttgcagggaagctttcctgtgagatttctcactctgggaaagcctcagctcttgactgtaggctcctcacctttcaaggctatcaaagggtgaacacacaatttccatcatgagcaaaagcctatcagggcaaaagcagcttccttgcttattacctttctaggttcaatgtccccttcagtttgaccctgatcattaagttgttgtagttctctgggtctttaaagatagttttaatggccaggcatggtggcttatgtctgtaatcccaacactttgggaggccaagacagcaggatcacttgaggtcaggagtttgagaccagcctcgccaacatggtgaaacactgactctattaaaaacaatacaaacattagtcaggcatgctggtgtgcacctgtaatcccagctaccctggaggctaaggtgggagaattgcttggacctgggaggtggaggctgcagtgagccgagatcatgccactgcactccagactgtgtgacagcgcaagactctatatcgaaaaaaaaaaaaagctttagtatcaaacccagcttcttaatttttttcagtggaaaggatggtccaaataacctaatcagccattaccagaaatagaaagtccccacattgcatttctgaaatatttgaattagttaacatctgtatcagtcagggttcaactagaaaaacagagccagtaaaagattgtgtgtgtgtgtgacagtaattggcttatgcaattttggtggatggctatctgccccgttctcaatgctgtctctctaatgatggaccctagcaggcaggcaggaaaggaaaattacaagtaggcttggtgactagagtaaccagcagaagctgagcctctttgtcacagagttgaacatacacacatacacacacacacacacacacacccctggcccaggagtcagacaattaaaggaagacccaatgggcaggggaagtgattgcaggctcagctgctgcttcccatcaaccagacacataaatcaacagatcagcaacaatgcctgagtattacacaatgactgctgactcccccatcagccctccaattctcagaagaatctccatggaacccacaatagctggaaacatacagaaagggaactctgggaaatatagtttggctgagacagttggcacaataagaagcatcacactgttaagtaaaaatcagaaaatgttttatttcaaaaatactctgtgtctcttgaaaaattagattctaagattataatagaaacatgcaaagaatttctaaagctaagaagaagctgtcccttagggctgcatggtactccctaggctgtttcaaagattgctattgtctattggccccataaggtaactgagtttgagatttaaacaaaaattaaaacttagattcgcatggatgccgttgattcctcccccttttctttaccatatcaactttctttccccctcctttgtccatatttttctttcttgaggatgagaaaatgtggacatatggtgataaatgtactggatagagggcagaggctcagaagagaatcttccccacctgctagagtagggggctacatgttggtggggttcagcgtcttcccagcaaacaatgattttaacaccgggaataggatgaggtggacttttatcatattggctttcatctgcccacctgccatacatgaaaagtccacacaaccacggatggaaaaccttttgggtttatttccacttctacttctgtgtgcctgtcattgggcatgatttctgtgaattttgctaatactcattagatttttttaatcctcaatgtatctctgttttttttaaagccctattttgatataaccaggatagtgaaaattatcaaacacacacatccaaaccactttaaagcaactaatgtaaaattttaattgttttctagaaaccaatagctgatttaactatgaccttcaatattttaaagggaaaagatggccaacctcaaaccaagagaaatactctcatcccttggtatctatggatggttggttccaggactcccctcagatacccaaatccacagatgctcaggtcctttatataacattgtatagtatttgcatataatctatgcatattctcccatgtactttgtcatttctaggttatttataatacctactacaatgtaagttctacgtaaatagtgttatactgtattgtttagggaatcatgtcaagaaaaaatgtctatacatgttcagtacagacacaaccatccacttatggttcttctgaatagttttgatccaaaagtggttgaatccacagatgtggaacccatggatatgaaggggatgactgtatttacctacagaaaatccaaagaggaaatctactagatgctttgagatatttgatgaagaagtacttggagatgagagaaaaggctattgcatgagggcaaatgcaggcatactgggctgaagaaaacactgaagaaatttttccttccaaataggaaagcagttgccaagaacagcattacagtctctgttttccatgtattatattatatctaaggccatattcatgcagcaaattcaccacttggagtgctgtttatacattttctgtcaacagaaatcaacagacacaagtgttctgtgtttattataatcattagttgaggttaatctttgatttgtcaaggaggtgtttgaatttcctcaaataatattttcagattttaaagagtcacacacacacacacatatacacaataacacatttatacagacacacgaacaactttatacaattggagagaagcttagcagattaaccattttggcatcaaaatggatttcgccctatctaattatgctagtatataaaaatttgtgtcaaagagagtagccagcagcatgtgcctgtgtttggtacataagagagaatagaaaatacattgttttctatctttggctgagaaagatttgtttcctttttctttgcacctttcgtattatccaaaaaagaaaaaagcttactcttaggttttgcaaaatacacagtgagctgttacaattcttaagtttcttattgggtctgtgttttaggtggaaccaaaaaaccctaggacttgaaaaaaatattgtaaagcagtcaagacatctttataattgttgagtaccaactgcagtgcaatcactttagtcaaagcctccatcatctctcccctggatttctaagtagcctccaaactggtcttcctgctgccacatgtacacactcaaaatctattctcaacatgtcacccagaggcatccttttagaacacaagttaaatcaggtcactcctctgttgaagacccttcaatggctcccataatcctctaaaagtccaatacagtctaactccacttttgctgcattttttcttcccttcctccttgatatactctctgctcaggccacactgggctcattgctaggccccaacaagacaggcgaatcccaccttgagccattgtttcctcatctcccaagtgtctgtttgggcaactctctcctgtctttcaaatgtttgctcaaatctgtcagaggctttccatgaccactttattaaaatttacaacccccctccaccactctcccatccctgccatcctctctcctgtttattctgctgtgctttctgtttttcatagcatttgtcaccttctctcattcagtcatacccttctttcctaagtgtgtccttgagtactgccccacccatcagaatataagctccacaacgggaagaggctttgtctgtttcgttccctgacgctcttgagttccagacatccaagaacatcgcctgccatatagctggtgtccaataaatattttttgaatgcatgatgtatgtagagggctaacaacattaactttgtatgttaaaaaatagttctggctctttgcggggagaaaagtagtgcccttaagcccagactccttggactgtgttgttcactgaacaaacagctgtcaatcattcatcactatcttttctcaagtttcttgatggtagtgggattttgtggagaatatctcaaaagtaacagctgtgatcatttttaacaactaatttttacagagagtggggaggccgaggagaactcaatgccaattccattgcatgtgtgggaggccaggtgccttgtcacactgggggtgttggagcagataaaggcaaacagaggagttaaaactgtactctagaaggcactccaagagacgtcccagacaaataattggaaacaccagatgacttagaaatcaatttcattgccacaaaaatgacagcctccctttttttccacacagggggaaggttcctcctcattcttgtcggaaacttgccatgaggatccctctgtttcccccaactttactccccccaaccctcaagctctcaagtggtgaccaccgtccttccggccaggtaggactggatgggaggggtcgcttttgagagaagggtggtgtgtagccatccagttttcaggcatcacggacttgctcgtttgtccttcatcctccctttctctacattcccatcttttttttctgctaaagttcccagccacacccatgatcatttcctcatcctttctgccttcctctggtattaatttctccatcattgtgctctctcttcctgacataaatctcattcttccatattgtcttcttcctctttctccattttgtttctctattggcaaatttggcttcctttttaatctggattttctctcttgcactcagactattattcccactttggaaacatttttttttccatttctgcttctcactacactgttttcccgtggtcctattatcttacaatccagtgggatcaagttaactctcaaggagtctgtttcaatccactcccctcaacttaccacagccctccttttggaagtccagcaaaatttactttattcccacatggtatttagagtgaatggggacagcttgtgatttcctgattctctagaagcaagagctcttggaaatatctcactaatagggatgcttgggccaggagctctttgtcagagcaaacttcagcttgaaaatcagagcagactttaacttacccaaggagatgcatcacgaaaactattatattcccttcactaataagaaaactagcataagccattccaaagagtgtgcaattcttagaaaaaagaagcattcttgtgattataaataaagcaaactttattctaatgtaatgaaaataaaattctacagtgagacttgtactgtttttgtcttcaagtatttgttcatctgtgaaataatgcagtttaaaaacatgtcaaagaattactgaaaataactctttactgagaaagaggtatgagttattcctcttcctcgacatcagttgttgctctggctcagagcttttcagacctttgtgggtatctgaattacttggacatcctgttaaactgcagacacttatctaggatgtctgagtggggccggaaagtctgcctttctaagtagctcccaggggatgttgatgctgccacagttccagggagcacattttaactggccaggatgtagtacattcctacctccaggcttaagcacctggaagaagcttgaagcaactgtcatggcattttaatgtattttaactttttgacccaatcacaagcctgggcctttgatttttttttttttttttctactgcctgtaacactagaaagagggacacagggaatgccatgtcagaacaaagtcacaacatggctatgaattctgttcatgtcctctcaacagtgatcattttgtttctgtattaccttgtaatgaaggccatattggaaggtgagtagaggaccgacatataatatcaatttctggcttctacaagaaggcatcagggagaccttgacaatttcttcttcgtttggatataaatgttaagactatcttttaaatcatcagtgatgagcaccattcgatttttttgttgttgttactcttgttactgccctggtagttttgtgttttttgtttgtttgtttgtttgtttgtttgtttttgagacattgtttcgctcttgttgcccaggctggagtggaatggcgcaatctcagctcaccacaacctccacctcccgggttcaagtgattctcctgcctcagcctcccgagtagctgggattacaggctccctccactacgcccagctaattttgtatttttagtagaaatgggatttctccatattggtcaggctggcctctaactcccgacctcaggtgatccgcctgcctcaggctcccaaagtgctgggattacacgtgtgagccacggtgcctggcctgccctggtagtttttaaagctattgtgaaacatctaataccacaagtagaatatcttattttctcaggggatgcaaatgacagtgggtggaggagctaagaacacatgacttaggttttatttttcaaaacaaatgcaatagagacaaaaatgctgcatttttgttgctgtgctctttcaggcttgtaatagcgtgttcacaacttgtattccctttagaatgtcaactgagatacccactggggaaaaatatttattttaagaaagagacaaatatccccacaatacctagacttcaaacatttaatcatattgttagtttgtttggtccctttagctttccactataaaagatgacataaaaataaatatttcacacttttcatgtcaaaataggtctcgtggctaaagcagaaaaagaaaatcccattatagcattttatatttgaaaaaagaacaaaacgttcttttataatagtgtatggaaaaaagatttttgtactaattttaatatttccccaaatgttttttgcattcttgttctttccttaaacatcttcattcatacactacagctgaaaacaaaatgatgaataaaaagtaatagtacataaggccgggcatggtggctcatgcctgtaatctcagcactttgggaggccgaggtggatggatcacctgaggtcagaagttcgagaccagcctgaccaaaatggtgaaaccccatctctactaaaaatacaaaaaattagccgggcgtggtggcaggtgtctgtaatcccagctactcaggaggctgaggctgagatgagataggagaatcccttgaacccggaaggtgatgttgcagtgagccaaggttgcaccattgcactccagcctgggcaacaagagcaaaactccatctcaaaaaaaaaaaaaaaaaaaaaaaggaatagcacataaaggtataaagctgtcatgtgtttgccaaaggataatgttttctattatgatagaagattggccccaagagtagtcatcacataaatagttggaattttacattttttaatttgtgagtgcaaatcttcattggtgaaaaaatatattccttgttatcagctagaccttaataggtgaagctaagtaggtgagttatacttttaactgtggtaacccattttttaaatagctacaaatcactgtagagcgagatataaaataaacaaaaaagatgtttgctcattttatgtatacataagtctttagataaagagctgtagaatgaccaatttctaaaaacaccaatgaaacattagaaaattataaatatatgccaagtaattattaatgcctgctttattctaggatatgccaatttcaatagaaaacacaaaagaacagaaaacatagttcctacatgctttgaaataataaaggtcagtttaaggccgtagaaaggcatcaaaatatttttctgacacataatactaaaaacaaaaattagcatttatggagcacttactgcatcatcaaacacctttaaagcacataacatgtgttatcttcttattcttaccactgtacatttggagaaactaaggttcaaaaaggttaatgaactttactaaggtcagacaagaagtaccagaccttggacacaccatgtgtccttcagctttctaagtatatgtctgaagctaagattttatgatctagatgtcaaagtaggtgacttctctttcttatgttgacatggataaacaagcaataagggtacaacacctgtgcctcaatatacttatctgtaaaatggaaagacgacgagcctctttgttaaagaagcatatctctttgagtggctagaagggatacacaccacacatgtataccaaacactgtttcatttgctggtggcatagcccagcctccacaagatcgtggctaaattgtgccagagatttcacccccaaactgatcacaacagcacaaggcattaaacatcacaggcagcacgttcacattgctcaaagtcacttgtttttagcaaacttctgggagaagaacatctctgaggactagattttagaaaacctccagctctgtgaaaacaggactcacctctaggaaaccacaattagtcacagtttctgtcactgagaggtgggcagctgttttccgtgttcatcgcatctgctggggaagcaatgccaagcagaaggaaagggagacacctgaggcacagtgtggcctgcacagttgggttaagataattttgagtcaaccttccctgtctatggctgctgaaaactcatagttcccctctctaaagcagcaggattgaggaagggctcacccactctcacctccttccaactttggctttcctccttcctctcatctcctctacttgcaagccattcggcttatacatgtcaatgctgtttcaacaacagactcagtgggtttgcttcccctgaggtcttctttctctctctcctcttcccattcctcctcttaagtctgtctcttgccccagccttagaacagaatccttgttaactaacccttcttctgtactatacaagagaggagttagagtacacgttgggctttgcaacgggtctgctttcatttgttaagcaattgttttttatttggatttcatttattcatttaaatatttatgaagccctactacttaccctcaggatgctaggcattctaaaggaatatcttgctagagaaacgtctccgtttagattgtaccttaagtttcagtcacagcacagaaaagggcttctttggaacctgtgacaggtgaccgtcttctccttttcctctgcagttagattcagggcgactgctttgggctaaattatgaaagacttaagcaggagtaaagagatttttctgaaagtaaaaatatctaaatacctaaatagattcccgagggctgttgtgtgtctctttgaagatctttaaatgcggagacaaagaaggcgtctaccagcagagggttgcgtatgtctgagtgacctttttatgatctcttttgagtccgtgaaggatgcgattaattaaagtcggaagtttgtcactgaaataatagttatgagatccagagaattcaaggtgttggaggactcattaagtagttgcataaatatcatgctgaaagatttaatgagaccacagggtcacttatagaacgatggtgcagagatgacctagaaaaaaataaattagaatcgatattgtgcttctgaattaacagctatagattgctatattaacacctgagacataaattctataattatatcttaatgatgaatattgatgttcttgtcacggaaaaaatgaaaattgctcacatttagtattttacttatcaatagtaaaataaatgtatatatgcgtgcttatttctgtgacatctgggaaccgtgaatgctttaagtagctacaattaaatgaatagtgttttttttttttccttttaattcaaccaatagttattaaatgcctactacacagcaggcactgggctaggtgctgggaaaaaacacagatgcacccttttccccccttcaagttgattatagtatagtgctatccaatagaattttctgcagtgatggaaattttccatgtctcagtgtccagggcagtagcaactagccacaagtagttattaaccatttgaaatgtggctgatgcaactaaggagttgaattttttattttattttaactgtttatatttaaatataaatataaacagccacatgcttaatcttagtttctaatgtgtaatccaccgttgtgtcaaaaaggattgcactgggacaaaagactatgttcatcattataaaagagctgtttacatgggaggaaaggctgacacataattgaggaaaccaaggaaggcttcacagaggtggcagtcactgagctgagacctagaggagcagataagaaggacttcctcatgacaatatgaaaaagcctgagatgcgagtatcatgttacttgcatcttgtggaactgtatgtaatttcatcatttgcatgttgtgttactctgctcagcttccacagcaaaatgtcacagactgggtggcttcagcaacagaaatttattttttcacaattctggagtctggaagtctaagatcaaggtgcccgcgagattcgtttctggggaggcttctcctctgggtttgcagacagtggctttttgccatgtcctcagatggcctttctatgcacatgcacagagagagagagagcgcatgcacacgctggcacttcttccttttcttataaggacaccagccccatcagatcagggacctactcataggagctcatttaaccttaattacttcattaaagatcctgtctccaaatataatcacattgagggttagggctttgatatatgaatttggggtagacacaattcagtccataaaggaagtatatctctcacacatagctcacacaaattctgtagaaaactatcatctatttacctagcatctggtgattttaatcactgcttttgacttgcatagtgatagataacatagggttctagaatagtaacaggtataaaaaatacctaaaccaaagtatccacctcacagaactcgaatgtaattaaatattgcttaagcaaatattaattttcctttattctttgaagacaaaccagtggtgagctggagcttactatctaagctcataagagtccattttaaaatttttcagggattttgtgacctggttattcaacacaaccattactacaaattaaattatataaactttcaatgaaataaatttattcaaaacaaatgtaacaaatactcataactcatcatttaccaattttttcctagagctttgttgaagcactttttaaattttttttaagacagggtctcactgtgtttcctggctggaatgcagtgaagcgatcatggctcactgcagcctcaatttcccgaggtcagttcaatggatcctcccacatcagcttcccacgtagctgagaatacaggcttaccaccacacttggctgatttttttttatttttagttttgtagaggtggagttttgccatgttgcccaggctgatcttaaactcctgagctcaaagcgatcgtcccgcctcagcctcccaaagtgctcggattacaggcatgagccaccatgcccggctcacttacaaataatttaatacctctcactattgccggtgctctcactattgctggtgctctctaggtactttgcatctttacatctactacgcaccatcggtagtggtggctctgacagtctgctactgtacacctcctcccaacgccttattcaaggtcacgactttgttactttgagactggctctgggcaagtatttacaccattgaaaatcaacaatctctaaaactgggccctttcattttccaggagagccgtatattaatcatttaccggcataccactggcacaaaccttaccctctttcatggtacagggttttcccagtatttatctggagttcctgttgcagctttccatggttgaaacattattacccatcctttaaaaacaaaatgaaactttttactgaaataaattaccttctttaaagcttttttttctgtttcctccattagacagagcctgtactgctctgttgatctatgaactttcaggccctcagtataaaatgttttaaggacaacagaaaagtcccctaaaacttacacctagcattgacaacatttttctagccccctcagcaatgtcttctacctaaaattgcctcagctgtaacgtaacatacctcctgctgctagtactagctcacagctaatactaagcgtaacacctgactccattttacaggggccactttttttcctctaaaagttttatgtagcagtaagtgaaatagaatagatgctggggtaaacagcagtttccagattaaatgttattttctgtaggaaacatttctctccaatgttgccccttcacaccatccccaaacaagtaaaaagttgctcagactttgaaaatgtaataccatctggcagaactcacattcgaccttttattaaaactacaattatgtcacacctgtgaggtttaaaattcaaggctccggaagttaaagcgacgtgtccaaggttacatggaaaattcttgagagctcacagtttcctgccctggcctttcacttcggatgtacaccatagtacgtgtgttttctgattagagctctcttcagttatgatttattttaccatcataacattttgggaggctggtatgagggagagtatagaagaaggaattcaagcagaaaaggttaaatgatttacagttttcgccctttctccaagggaaatttatgtgcccccaaattttagaatcatgaatttagattgaatgagaatggataaaatccatttacagtcaatttagattgcataagaatggatgaaatccttggcatatctaaagaatggaaaagggatcccaggaggtagttctggataacttttaacttgaaaacgtctggtagaggccgggcatggtggctcatgcttataatcccagcactttgggagggcgagtcaggcagatgacttgagcccaagagtttgagaccagcctgggcaacatggcaaaaccctatctctacaaaaaatacaaaaattagctagctgtggtggtgcatgcttgtagtcccagctacttggggggctgagagatgggaggattgcttgaacctgcgaggtcaaggccgcagtgagccaagatcgcactactgcactctggcctctggcctggacaacagattgagaccctgtctcaaaaataaataaataaatagtctggaaggatagaaaaagcaagtgagaaacaaaaaagggaccacctatgaggtaggaggaaaaccaagagtgtcaaacaaacccagaggaaaagcagtgcatgagtatgaagggcatgatccccagtgtctaaagttggtgaatgctacaggagagtcttctttggttttagtatccaggaggtcattattggccttgatcttaatgaggaatcagccaaaaggtggggaagggaaccaggtaagagtggattaaacaggagaccaggaacaggagacagcttatctaacactcatttggaggtttagactcgaagggaagcagggatctggtctagtaatggaggaaataggagggaaaatccatttgagaagagattaatgaatccttctaattcatggttcggtctagtttatcatgaaacactaaatcaaatgaaagagttgcttctatagccctgtgcacttccatcagcagattttatattgagttgtgcagatcaaccccattgccaaggaagaacaagaaaaagatatttcacctacattaatggttggcagagtggtttttccctctgataaattaatattcaatggaggaacaatatgttaatgagtatacagcatatattattcagaacaataacaataaaggatttctgtagaccttgtttaaatgttaggttttcttttgctgttgagtacatgaacagcaatacttacacaacttacatcatgatcgtcagagccgatacagaaagccacaggcctgcctggctgctacactgaggtgtctacagaccaagaggcttcacatgtgcctttctgtaattagtatttactcagcctcctatagcagggaaaatattttgcacataataaactcatatatttccttacccattaaggggtaatgtacttaagcacattttcctgtaggatttttaccagcaaggtcgagtcatagctccaggagaggaaagaatgggactcactagaagagaagatcctcattagcaagtgaaaaattttgtaaaacagggattacaagagaggaaggtatttttttttcaaatttttcaaattcctttaacttcttctaacatggaagtcagatctggggggctagagccttgcttgctatatacccaaagatgacagaactcaggataagacatagaaaaagagaaaagcctgcccccttcttcctcaggccttggaatcgttggaagaagaaggggagagagagaatagagcaggaaatgagactttgtatgtacctctctgacttctaccctccaggcgaaaatccggaagattctggagcaggctcatgacacctcatatcttgtgtgtcttagaagggacacgaaagctcttgcatgtcctggtgatgggaaatggtggtgtgagcgggggctggtgtgagcgggggctggtgtgagcgggggctggtgaaagctgggacaagacaaagaggctccctctggtgttgacttcataactgaagtccgctggactcaagtaatgagtggacttggccagactctaccggggcatctcgccccaaatggccagcagtcttgtgtccatggagaaatctagaccaaccatttcacagcacagacctatgaggatgcagagagcagcctggcaggtctaagtctgtgcctttctcccccttggaagacacactgatttcctgaatagatttacccaccatttgggagagctgaaaatgggaaggacaactttacaagcttcaactttacccaaagagactgactcatgcaaaaaaacgtgtaaaaccaatcctatggggagtgaaatgttgaagaaaccataaggaaattgtctatttcctttaacagttagaaggactagggcagcttcccttcctgtcatgggaagtgtggctcctacgccctctgggagagtggtttgagaagtgtttccgctgtgacttaaattatagccatttcccgagcaggcagcccagggactgtggtaggcagtgccagctactcggagtcaattgaaagggaattggtcgcctgggaggtttctaacctgatttcaggtttcctggacaccgcgtcctctcctgacccaacacctgctgtgacagatagatgtttgtaatgaggtgaataacaaacagtctcatgaacattaggtcacatggaacaaaaggcacactggcttaggtggagcctgcattttcctgtttttctaatacatttctctaccaagtctactcactcgcggaaagctttggcaagatttttaggcaaagcctttaaactcacatttttttgaagaaaaaaatgtttgctatttcatggctgaaagagagactcaattctgctgttacattcagaaatctgtttttttgtttttaaatgtctgtttcatacttaaaatctcagaatatcttactgagaccagctctaaagtaaactatttcaccacactcaaagaagacccaaccatcataataaaaggggcagaaagaaacattgggaggtgatggatttgttgtaaaaatgaatgagggccaggcacggtggctcacacctataatcccagcactttgggagcctgaagtgggaggatcacttgagccaaggaaatcgaaatcagcctgggcaagatagtgagaccctatctctaaaaaaattttaaaaaattagctgggcatggtaacacatgcctgtagtcccagctactgaggaggctgaggcgggaggatcacttgagcccaggaattgcaggctgcagtgaattatgatcacaccactgcacagccagggcaacagagcaagattctgttttaaataaataaataaatattaatgaataaaatcaaatattcctaatagacaaactggcttttgacttttctggtggtatttcaattgatttttcctgtagcggaattcataggtgaatgcctgccacagcaagggtccagtgtgaatgaagctttctatgtgatttgtaggtttttcctctgccctgatgtgactaccagaagtggggttcagctgggagttttagaaatgactttttctttttatttaaattttgtgcctaattatattcttagatgtattggtcagagctttatcatgatcattcgtatatctacagtccctcagtatttaagtcttattagcaaaagtaaatgtgaaaaaggtattgtgtgagattttacaacagcccaagatgaagagtatagatgtgtgtggtgtttgtcgatggcattatgcttctatccttgttctgacaggattctggccttttggaacattctgtctaaggattgaagctaatttagttgagaaacctaaatattacatttcgagaatgaatttaacacctagatttccaatcttgaaattacaatagtcactcacttatcaaagagtagagtagaaaatagttctttccttttaacatcttttctctcttaaaattggaggacagggatttataagtagtgttccatctatccatccatccatttatccatccatccatccattctttcatccacctatccacctatggtatgtacttgcatgtgtgtgtgtgtgtgtgtgtgtgtgtgtgtgtaaacatatttaaaaggcaggtttactcattgcttttggtacagttctctaaactaaagaagcttatgttggtacttttattgtccatgaaattatattatgaaacaataacaggtaggaaggatgggttcccataaatatcctcttactctctttgcattttgtatcatgtgcactactaatctcttacatttgttaatccattgctatggttttgacataagttggactgacaccttcatttagcagatgtagaaagaggcccagagaggtccacttacaggcaggagtagggccaggccagaaatctagtctcccgtctttttgcttttcttagcaaacagattccccaatgagcagacttgattgtgtcttgctgcacagcaatccacactaaccatacaggtgtaatgtccattatctaaaaaccccagtccgctttgatttcggatcatgtgcttcccttctctactgtgcagatgtcaggtaaacaggtcatcgctgcactgcttcattgtttgttccagtcttcttttctctgggttccttcctttattcattttcagctgttatgaatttatacacaattaaagggggagggaggcatattaattgaaaaattgatgacataaccttgagggctttgctttaattacctccagtgtccaggaatgacagttcttcagatttatcttctcttccttaatagaggattttcccactggacagacttctggcaatatctggtgttcagactgtagtgccatgctctgctatttttattactcacacaaaagtgcgttgatgggccatgggcaagttaaatttatcatcttgcaacggtgggatgaaagagccattgctaaccctggcaaacctaaggtgtacaatttcacaaaattacatagatggtaagaggtggtgttgacacaattggagctgacactttcatttagccgacgtggaaagaggcccaagaggtccacttacaggcagtggtagggccaggtcagaagtctaatcttcagcctccttgctttgtactcccgacctcaaacccgaccactctcttctcccaaccataatgcatcttagtgagttacagtacaacaaaagatctagaaatatctgactattaaaaaattatctgctgatcataaaacaattgaaaacatagagaagaatttagttaggggctagatgtagtgtttaaaatttgaaaatcaatagttttcctctatagcatcaataatatctatctgtctatctaattatgtataatatgaaacaaaacaacagaaaccataagatatattaatagaacacatataacctgtttatagatattcctaaggaggattgtggcaaagattcctggaagtgatatttaatggtatcttataaaatggtagtgaagagaaaagtaaaacagtggcaaagaatatgaaagatgagataccagtgtataagagagcaataaataattaaaagcaaacaaatgggaaggaactgatctttcagaaaaaaccaggagatacagctaagtgcccagagcacaggatcccatctgagagggacactggaaagagaaaaccaagggaggtaaattatcaaagaaatattataagaaacattttcacaactgaagaatattaattaccagactgaagggccaaactgagtgcccagccacaagaaagaaatgacccacacttaggctccaaactggaaaattttggaataccaaaaacaaaaagaatttttttcaacatttccagaacaaaaactaccactcacaaattgaaagtcagaatgagatcaggcatctctacagaaaatgaaagtttgaagagtaaagcaaagcattcaaagtcctaaaataatttaatggggaattctgaagccatactatcaagccagagaatagaacaaaaacatgttcagacatacaaaatactgtaccatctatatatttttctaaaaggcaaaacaaattctgttctttctataagcatatatatgaatatgaatgaacagagaatttctggacatctacataccaaacttaaaccatggtttacctgggggaggggactgggattagggaggtggccaaagggtgctttgcagctatccatattgtttgtttgcatgtgtttactgaaataatgtaattatgtattatctgggtgattaaaagtattcttcatgttaatgcaagataatccattagtgataaaagttagttttaaatgagagcttgtttgaaattctaagctttcctctaactgttcatctggaaccacttctttcaagtgccctttctatttctagctttaaaaagaaatccaattcaggctaaaaggagccattatagtttcttgatatcatcacatttctgttaatgagcccttcaaacttgattggttcttagtagaattacagtgattctgaagcaatcctgaagtcacctgtttccctctgccatagaaaatgccgcatctgttgctgatataatctaagataacaaaatatcaagaaaacaaaacagagagacctgagcttccaatgaaaactctgtataactttttaaaatatgtttaaatgcatcaatgaatgggaaaaaagtagagaacgctcagaggacaaggtccaagtgaaagcaggtaccagagaggtgagcagagcatgcaagctgtcctttatcttgaaggtgtctatcagtgtcagcttggtagaacttggtattgaaacttggtgtagaatagaggaggaaaaaattctccctgagaattcatgattgcaagctggtcctcactggggggtttgaagcctgaattcaccccacctgacaaactcagggccagactgaagggccaaactgagtgctcagcaacaagaaagaaatgacccacgcttaggctccaaactggaaaatttcagaataccaaaaaacaaagagatttaatttaaatctgtctcatcctggaaatcctctgggctcctgacataattaatcagtttgtttaaaaaggaacccatctttaaaccagaccttaaactattactacagataaagttccaggaaattcaccacatgaaagcaatcacaatgaatacgaagaaagtccatgagtgagaaagagcaaaaataacagacagcagaatgacccctacaaaaacttgagattttggaattatgagaaacagaatattaagcaagtacttttaaggttgacaatatgagtaaaaagcaactgactaaaaaaagcgatgaagcacatttgcaaacaaacaaattgattctctataagtgaaaaatatatttaaaatgcaatgcatagttatagcaacagaaagagaattagtaaatttttagtgatctatataattagcaagaatacagcaaagtatcaaagacatggaaaatatggtagagagatcaagaggcacgaaggatagaatgagaagaggtgagagcaaataggtacaggagattatctgaagaggttatgtttcagaattaataaaattaattctggattaattcatagattcacaaattcatagattaagaaatctcaagcatagtgtattttaaacaatgccacatctaaatataagtatcatatttaagttccagaaacacaagtatcatttaacaatgaaagtaataaagagatttttagcacagcccaggaagacaaaagatggggagcaaggatacagtgaggactgagggtttcccaccagcaaatcttcactaaaggaaatcatatctccatatgctagtcagacaaaaagatgcccactattatccctttctgttcaatgcagtaagacaagaagaataaataaaagatacaatgttcagatattaaatgaaaaaatatttgcaaatgatgtgaataactattcagaataatctacagataagttaatgagttagcaaatatgctgaatataaaattaatttataaaaatccatttcatttccatatataagcaacaggcagctagaataacttaaaaaatatataacatcataacaagtaaagttattattgggtataacatcaaacaaggtctattataacatgcttatgaattggaagagccaatagcataaaaataagttctggccaacatggtgaaaccccgtctctactaaaaatacaaaaattagctgggtgtggtggcatgtgcttgtaatcccagctacttgggaggctgaggcagtagaatcgcttgaacccaggaggcggaggctgcagtgagccaagattgtgccactgcactctccagcctgggtgacagagggagactcagtctcaaaaaaaaaaaaaaaaaagttctcccaaattgatctatagattaaatgcagtaccaaaaaaagtcaacatttgtagaatttgacaagctgattccaaaatttttatggtaaagcaatggcccaggaattaccaagatgtttctgaagtgggacagaacataaagattcatcacatatcaaaaatcattctgaatatgtagtaattaagatattagtgggatactggcagctttaacattggcacaaatatgtgatctatgaataagcgcacactgatgtgagaacttgatttatgagagagatggcactggagacatgtggagaaactcaggcttttcaataaacattgaaagaactattattattgatatggaaaaaaactaaattggattcctacctcacctcacacacaaaaatcctatctatgtggtttcaagaattaaatatgaaatataaaactataaatctttagaatattatgtagaatacctttgtgcatttgggaaaaggaaggtttttctttaccaatatagaaaaagaacaaaatttaacagaaagattgataatttgggctaaattgaaggtaagatattctgttcatcaaaagacactttgaagagagtaaaaagacagataactcctacacttaaaacttaatcaaaaattagtgttatacatcatcctttgctaaccatgagggatttgttctaggacccaccccgcccagataccaaaacctgcagatgctgagcacctgacacaaaatggtgtagatagtctcaaattgatttccagagggtttgcaccaatttttacttccaccaacagtttacagttgtcccagatgcaccatatccttgaaaattacttaatatcattagacttaaaaataaaaagtagcaaaacatgaatccctggtttagttggttaaataatggtccctcatattcctaaacacttcctcagatatgccagtgtagaggtataaaatagtgtaacactgtggtttatttatatgtattataaatatatattatatatagtaaaacctattcatcctcctatatatattaaatcctctccagattacttatactacctaaaatgccatataaatacttgttacactgtattggttataatttgtattatgttttatttatgtttttttttttcaaaattttttgagttacaattgggtgaataggtggatacgaattcaaccagcagatacagagaacccatggatacagagtcaactgtattatatagtattatatatactctatattatagtaatatattataacatagtattatattattatatatgaaattcctacagattaagtgaaagacaaacagtagaaaaatgtggaaaaactcaaacaggtgcttctaatatggaaaaacacaaacgattggcaacatataaataggctcaagctcattagtaatcaaagaaatgcacattgaaaccacagtgttatattattttatgccttcagacaggcaaattttttaagtctaacaatatcaagtgatttgcaaggatatggtgcatctgggacaactgtaaactgcaggtgggagtaaaaactggtgcaaacactctgaaaaacaatttgagattatctagttaagttgaaggtgtacagtcctataaccagaaattcctcatcaaggtagaaactccctagagaaattgtagcatatgtgtatcaggagcgttgtgccagagtgttcatagcaacactctctgtactagaaaaagaaatgaaaaataacccacctataatagtagaataaagcaatgttaatatattcctacaaaagaatattacacaacaactaaataaatatgacttgtagctacacataacaacttggataaatttcatcatcaaaatatttagttaaaaaaacaagtgggaggaaaatatatacagtatgattcaatccaataagtttaaaagcatgcaaaatgaatcaatattttagtatacaaatatgataccaatcaattttttaaagtatgagaacaataaaaccaaaaaattcaagactctcattacctctgaggagtcagggaaggagagaggattttataaactagtcagtaggtgtttatgcttcaatgttctttatatcttatgactattttaccctcttttatatgtactcaatattgaagagatcaaagctatcttgagtagaggtaaaagaaaaatttttttagttaaaaaatatatttaaggccgggtgcggtggctcatgcctgtaaacccagcactttgggaggctgaggtgggtggatcacgaggtcaggagttcgagaccagcctggccaaaatggtgaaaccacatctctactaaaaatataaaaattagccagacatggtggcctgcgtctgtatcccagctactcaggaggctgaggcaggagaattgcttgaacctgggaggcggaggttgtggcaagctgagatcacgcctctgcactccagcctgggcaacagagcaagattccgtctcaaaaaaaaaaaaaaaaaaaatatgtatatatatatatatatatatatatatatatatatatatatatatatatatatatatttaaatgacacttttaaaaatggagggaggagagtagttatgatatatcagtttactgtaagaataattttgacagatgggatattttcgcatgtcagcatcattcaaattttttattatgttaaactgattaacagtaattacatataaaaagtggacattcaagtcattcagataaagccactaccccgctctgtgggtttgtcagaaggtgtcaagtcctaccttctcagtaggcgtctacacagcctggcgctgtatccctctccacccgccccctcgcagtgtgcactatacttccactgttccagctctttgtctgtccccagatggaaccatgcttctcctgtttctgctgctaggccacaattcctccagatatctccacactggtacctttttctgcagttcttggttcaaatgtttctttgcagagagactttctcaaatggcagagtagtttctatcttttttccttttttttttcttttaatgtgtggcaccatcattctgaaaatatcttattcttgtgattacttgtttataacttgtttcgtccccacacaggggccgcgtctctgttatttctccaagcacctggcatagaggagatattcaacaactttatagaatgagttaatattttgcagactaaatagttgggcaatagaaggttgcatatatattcttattttttaaattggggaaacagtaaagttcagacccattcactttaaatattcatccaaaagatatttattaagcatttagtatgtgtcaggcactgcgctgcatactaagaatacagagtgaacaggaaggtagccaggaaccctgtgctgggaatggacaggcctccaggtgcctaagaagatcagagtaaaatcaggaaccaaatgatctggaagctaagttgccaaaatactgtgggtaggattctgggcatttttcttcaataattctatagtgatacctaaagccagtgtggagattaaaggatgagactatcagaggtaaggggagctttaggacacaaagctagtcattgcaccaatgccagagtttccacgagaaagaaaaactaaaaagcagcaaaacacaagtccctggattagttggttaaacaatagtccctcatcttcctaaacgcttcctcagatatgtcattgaaaaccccagctgggaagacccctctgagttccaagactgactaatgaaatgatatttctacctttgatctgttgcaataaaattaagatgtgagtagaagagaacagagatatctctataaagttccctgttacagctcagtcagccctttgtatccatgggttccacatccatggactcaaccaactgcagatcagaaatatttgggggaaaaaacggtgtctgtactgaacgtgtatagatttttgtccttgtcgttattccctaaatcattgagttaggtattatcattattccctaaatttacattgagttaggtattataactagcctagagatgattcacagtgtataagtggatgtgcaacgggcatatgcaaatactacaccccttttttgttttttgttttttgagacagagtcttgctctgtcacccgggctggagtacagtgacgcaatctaggctcactgcagtcttcgcctcctgtgttccagtgattctcctgcctcagcctccctggtagctgagattacaggcatgcgccactgcgcccagctaattttcgtgtttttagtacagatggggtttcaccatgttggccaggctagtctgaaactcctgacctcaggtgatctgcctgcctcagcctcccaaagtgctaggattacaggcctgagccatcatgccccgccagagccaccacccctgcctgcaccactttaaataaggaacttgtgcatccgtggattttggcatccaaagagggtcctggaaccaatcccccatggatgcctagggacaactgtattatattaggttgctaatcaattcgtgtacactttacccagttttataccatattcaactattgatatttgatttgacatacctgtggccatttttgaacaaggccattctgaactaatatgtcttgatgtgagagcatattccctagtggcatctttgtttctatggaatgctctgattcaatttatatccctttgatttatatcctgtttccatcagggaacaagctctcagcactaacgccttctacacaggaatgcctctaccatctctttcagatagttcagaaggcccttgaagatcttacacattctaaataccctgggacactttccaccatatcacaaggtcattacaattgtctgccagtgataattttgttccttaggttccttaacatttactcctggttctcggtgggtttgtcagcatctcacagggttggcaatgacacccactatacttctctctatcccgccttggggaatcagtttaacatcttatctccttgcttgttggaattgacacatccagcattcagactgtccatgctacatgtaggataaccaacaaacaaaattgcgttttttgaaacttaaaagctcaatacctttatttactattagactgcagattgttgggcctgtaagtaggacacacattgcctagagtggtccggctctgtcctttgccatctggctgcatgaatcaatgtcagctggatacaaatatatctctggaaaggggacattgggaaaaagggtggatacactaagcatagaccccagaacctgttctcagaaaaatattttcatggtaaatcctgagatattaaaggacaggtttaaaatgctggctgcatgctttctctgtcttttattttcattggatgctagaatttgaatgggccctgtttctgctttattaatccatattttgtggcaggagaaattcaggagaactcaggaatggcaggaagtggatgagaaagagtgtgtgatagaaactgcaagtagccttaagggcaaaacaagaataatgctactgagatgatgaggcttgcatatccagctggctactgtattctggccaccagaattggatttcagcttggattttcgaggcttagcagtacaatgaggactgggattcataaattataattataagtgttatttattaaaaggtagttttggtctcagaaggaaccaaataataataatgcatgcatcactgaaagataaaaatccataaaaaataattggggaatatgagataaggggaaaattgagaataagaataaaaaggtaacttggagtaagggaggaaaaattagtaagccaatcataacacacaccccataacatcctggatattggttgatgtctggatattgagttcatgggtcaacactggccacagaggtgaagcatcattggagtagcttgggcttgcaaggaaggttggcattatatctcttcccatccccagatgccaccatagactcacctacactatccccaggtcctcattgtactcattttattcattcacacgttttttgaatgtattcaatatgccagtgaccaagttctggagaaaccatactttgtaaaaagtagacattgtccctgctccagtgaaatttacccccccaaaaaaggagagaaggaaccaataaacaaatgatctcctgaactaattgtctagctacaaacccagacaagttatctgaaagaaaggagcatggtgccaggaaaacccagactggtctgagcaaggtaggtataggggatcgaagatcaggcagaacatcttggagcaagtgatatttgaactaagagccaaaggctgagtaggaattaactaggtaaatggtataaggtctggtagagtgagaaagagtgtgtggatgaagagaaaccctttcagatacggagaataatacacgcaaagtccctgtgataggagggaccatggtgtgtgcaaggaactgaagagtcatggtagatagaccacagagcatcaggaaaagaatatacaatggagccagaaaggtagacagaaatgaaacccataaagccttggctgctgcattaacaattttggcttttatcctaataagacttaaggctggctgaaggtagtgatatgatcagatttagactttgaaaatatttttattgattaatgtggggagcaaattaaagggtagaaggggcaagcgggttgcaaaagattagctagggatattatgttagtgcaggcaagagactctggcagtgtggagtcggtttatgacagtggtgatggacagaggtagaaggatgtgagaaacagggcctggagccggattggctgtaggatacagggaaagggaggagtcaaggaattgcctagacatgtggtttgtgcaactgagtggattttgactcccattcctgggctaggtgtcaaactgccaaactgggaatgagggggagggagccatgacagcaacgttggacatagtatgactgagatgttttcaggcatctagagaagtcatgtggatggtgaaatgtaccactttggaattgagaagagaagtcttagctggagataaaagatttgtgagtcatacataaaatggaaggaaagtggagagaatatagcatgacaaagaaaagaaggcctcaccaggcgcagcagctcacatctgtaatcccagcactttgggaggccgaggcgggtggatcacgaggtcaggagatcgagaccatcctggctaacatggtgaaaccccgtctctactaaaaatataaaaaattaggtgggcgtggtggcaggcgcctgtagtcccagctactcgagaggctgaggcaggagaatggcatgaacccgggaggcagagcttgcagtgagcaggagatcgcgccactgcactccagcctgggcaacagagcgagactccgtctcaaaaaaaaaaaaaaagaaaagaaaagaaggcctcagatggagccatggagagttttcaaggagcaactaggcctaggattattctaaactcagcactaggattgtaagggcaagtgtttattttctcaccattaacttaaacttcttctctattgttttgtgttacccatgacagaaaactctcactcatctctcactctagaatttcctcagttaaccctaaatcatctttgccaatgatgatagaagtttcactctaaatgggtttaatcaagatgaaaaatataatcgcatcattttataatgaataagacttcacaggtatgctaaatggttgttaccaaagtcatttaaataatagtgattttatgcgtctgtgtttcagtggttggcttctctggccttgacctgtgagctcagcatgaagtgctgagatttgatttaagatgacctagagtttatgtactgtcatttacttggaaattatcactttgcgtatttcagatgacatctcttaggtcagttttgcaagttcattatttcaagctgtctaaaggaggtataggattttgtaacaagtaattaaggaaaccaccataaaagtttaagtttatactatatgatagttttcattatccaatgctgcattttttgtaatagacattgaataggagggaactatccttactaagtggtaggcatttttccccatgattatttgttcactgaatttggaagtgatggaattccaatgaagagctatatcaggatcatatgcacatgtgcagtataggtatttgcatttgctatgtgtgtttccctgtgttcgcgatgtaatatataaaatcaagacatcaactgttgtctccccagagttatggctatataacttaagcagcaaaggaaaggatttaggggtccattttaatgtaggcaagagataagaccattttttcaagttaataggaaagaaaattatggagctgtactgtccaaggtggtaaacactagccatacagggctatttaaatataaattattgaaaaattgaataaaatttaaaattcagtttctcagtcacactagcacatttcatgtgctcagtgttcccatgtagctagtggctgtggtattggacagtgccaatatgcaacttttccacaattacggacagttctattgaatagtgccaaacaagaacagggttcaaatccaggccagtgcctctgtttgcacagccagtgcactaagaatgattttgacattttgaacggattgaaaaataatcaaacgaagaagaatattttagagcacatgaaaatcatttgagattcaaattctaatgtcctcaaaatttctattgagcacagccatgtgcattctgttatgcattgtctatgtgttcacactacaacagctgcattgagtagttgtgacagagactttatagtctgcaaagtctaaaatatgtactccctggctctttaagaaaagtttgttaactcttgagctaaagggaggaaaggagtagtatcacacattaccgtcataaaaaatattctgtatagatttggaaaatgaagtcaataaggagaagggaaagtgtatctagaattcatgcccagatttgatggctgtgggatatcctgcattggggggtgtgatggtggatgggttgaaagctctggaaacgttggcaatagcctttaacatgtatccaaaggctccatcaaaccctcagctttctcagtgtctttgcaggttttttaggatactctcaaaagctcacttctctctgtaattcaccatcttccccattgtaaaaggcaaattaagtcctctcaaaagtttgacaatatgaaacaaggaaattcagttagtctcttgacagcaatgccaattatcttccttttttttaaacattctcttaggcgaatgcctaagacaatggaaaattattttgcagtgagacccaagccaatccagacacaagctgctctcattacaaccatctcttctcatctcttgaggatgagctcactaataagagtacattatctcttattgggacaggcttaaatacatgcaagaacttcattaagtcattctctatcagaataggagctattgagaatttctgcagaactaggattgtgtcttctctacctatgaaatgagtggtgtcatgacaaagcactctagggagccctgccaacctatttgataatgttgatggacaagattgtatggggagtggggagaaaaaacaccttttatattcttccctgatgtatgtataagtagttctttaggaagagatgaaatgcgtggctttgtcctgaatagattcccttaggggacacccagggaattcctaggcccagtggaattaatgttctagaaagagaatcatgcttctgttgcagagcccccttcttaatcctcatgaatcctagttaataacacatataataaagtattcttattgatgcctgtaacttcctttgaaatgcacccaaaaggataaatgatatagacatatgctaaagcaagtatggtgaaatgctacgggtggaatctatgtggtaggtatatgggtgtccactgtaaaatgatttcaactcttctatatgtgaaaagattttcataacaaaatgttagggaaaaaatcctcctggaatacatttcatgtaagcctctaattcctcagcattagccacaagcagaactgtcttcaaaggagtaaatcatcaggaaaagtccgtgaccccaaaagagtgctgtccaggttttctcaggcatggctcaggttcaggcacaaatgcaagttcccagttcccatctcctcagtgtgtgcccgctgacctccctgcaacagttctgcccattgaccagtaggggataattcagatgaacaccttcgtgcttggaatatgagcacttagacttctagattttaaaaggatttctgagcccgatctttacacacatgctttagtttgtactgtctttctgtacatcctcagttaagagatgctttctggagtgttttgtagatggatttgaagacttctcactgcttcagtacagaatgccctggcaatgcacgcctggaaggagtccatggactgatattttctagccaaagggagctaaaaatcagccattttgacatttggatttttcattgatgtgtcttgtttatttaattcaatttaatatgaaagagtagagagggtagaacaaactgttcagcaacgtatagatcattaggttttaaaaccaaataaaaagtactcagtgtaaaaatttgcctgactgaaaggattttgaaattattcttgaaagctctgaagcacgcagaggcagctttggatgtgatggatatttttgctgcatagagtatccagtgccaaagagatgattctgtcagaaaatattacgaagccaacctagctttgataattgcttcagattgtctacatatataatcctaaatctcttttcaaagtacttacactaccagtggtctttgatttataactgctggtccaagagatggcctactaataatataaaacagggtcttagcttcactgcgtatcgtttccagaggatgtgaatcttaagtcaatataagagatgtgtgagtaggaatgagaactcttagaaatcataggaaggggttcaagtcacagggaacagcagatgtagctggcctaaggcaaagggaacagtgcaggatcagaaagaagtccattccaatgaaaagagctgagaccaagggaaaccataatggggccagagcatgcaagaccattgcaagaagcatcaagggcttggagctttatccagaagacaggagcagccattgagagggcatgctccagcttttgttttagcagaatctctttgcatgtgatgtggaaaatgaattggagaggggaaccaggaaacctgttaggaggctacttctgtaatccatgaaatggcaatattctgcttttatgtccctgagaagaaagcataggtaaggaccactgaatacacatttggtagaaaaagaatattccccggctaaggattgggaagataaaacaatcaggaccacccacccattacttcattttcctttatgtatccgatcaagtaccctttctaaaagaaggtaaactttacagttttttttttaatttaagcatctcattagaacctactgaatatgagtctccatgtactaattgtagtaaaatctctctgaaggctggcatcagtatgtctgggcaggatgtatattctagcccagattttgcatagatgtcacaaggagtccagaatcccttgattttcagacatagccattagaagcacactgatcttcacaggtggaggcctccactgccatcagtctattactgctgcttaaattcacagcaccgtggacaagaggagaaggtagcctagctgtttcattggcccccgcatctctctgccacatgatggacagccatatcagattgcattagaatgttgactgcatgttaactggtgatccttcttcctctcaatacttattttaaaatcactctaaacgccctgctcttattactaattagattatttggccttggtgtatagtgtcttggggtcatcagtatgaaggtcaagtcacgcaaaaagagtggagtctccaatgtggatacacccaggaggtcactctctccccaggctgtgtccaagtagcataggggagcacagggctctgtccccatgatgtactgtccttttccatgacattggagatgaagctggacctcaactctgcacatgcatattcctacaacttctcagagtcctgtggataatgacggaggagagaaaccatgcaggaaacagccccctagagcacccaatctggatctaagtttgtcttacatgtttaagaaaaatttgctttaatttattttactgtattaattgattaatttttaaagaaatagtggagtccatcactaagacctcaggccataccttagatattgagatgttgaataaatcccaccagtttattttattgtaatgtgcctcatttttcctaaaaactaaaccccaaaatataaaagttttcgttgttacttatttatttattttagagacaaactctcactctgtcacccagcctggagtgcagtagtacagttgtagctcaccatagcctgaaactcctgggctcaagcgatcctcccacctcagcctcccaagtagctgggactacaggcacataccaccatgcccagctagttatttatattttgctaaatgaatttttgaaataaatttcacagatatttccccattttcagttgaaatttaattttctttctttctttctctttctttctccctctctttctttctctttctttctttctttctttctttctttctttctttctttctttctttctttctttctttctttctttccttctttctttctgtgcttctttctttctttcgtattgctccttgtgtagcagggctatcccataggcagggtgcccagggtagtgaaagtttaattttcagagtttttaatgccagaatccgacttatgaattcactcagtagatattacatgtcactggcatatgaccttttaatagatattttattggcctaggaatggtaaggtcagagacttgagtggttccacttctaacagcaaaaagaaactatttctggctataataaaatttagcatcttaaaatttaaatagaatagttgtttatacttactcagggaactggagggttatatgggatatttaaataaattgtggaacacttggtcctgaaaactgcccattataatactttaaactaattaaatttcatttaaaagtttcaagcttcctgaacatcagggaaacgtgaaaatacagtcatgggttatagagactagcatcaggaaaaacagccagaaattctgaacttggatctcttcgcatgtccttgttctgcttaagaaattgcttaagagatgaccttgataacattttaaaaatttgagtgcgaagtgcaatgtattgcctttccatggattagagcacatgataactcttgagccagattataggaatccctatcataagattaggagaagtgagagaaaagaatcagaatcgaaagcctggcccacaggtgactcccttgtctaaagaaaacgcttggtcttgctttcagcacatggcttcctgaaaacgaactttaccttaataagtaactgtttaaaactttacttattaatttgaattagtttgagtccttagggaaccctgcgagggtttagttgtcttgattacaaaggcccacatccctcagaaagtaccctcatgtcggcagctggacaaccttaaggattgtcattgtggaatcacggcacaatccaatttcttatctcactgttatgagttgagtggtggtcaccaaaaagacatgtccttatcctgtttcctggaacctgtgaatgttcccttgtttggaaaagagatatttaaagatgttataaaggtaaggattttgcaatgaggagattatcttgggtcttccatgtgggccctaaatccaatgatgtgtgtattagtctgttctcatgctgccaataaagacatcccagagactgggtaatttataaagaaaaagaggtttaatggactcatagttccacatggctggggaggtctcacaatcatggcggaaggcaaaggaagagcaaaggcatgtcttacatgacgacaggcaaaagagcatgtgcaggggaactgtcctttataaaaccatcagatctcatgagacttattcactatcatgagaacagcacaggaaaaacccacctccatgattcagttacctcccactgggtccctcccattactcatggggattatgggatctacaattcaaaatgagatttgggtagagacacagccaaaccatatcgatgtatgtccttaaaagagtgaggcagggagagatttcacacagaaagaagaggaggaggaggcaatgtgtccacagaggcagagattggagtggtgcaggctcaggtcaaggaatggtgacagctactaggaagtgaatgaagcaaggaactgattcccccaaaggagtgtggccctgctgacatgttgatttcagatttctggcctccagaactgtgaaagaatacatttctattgttttaagccactcaatttttggtaagtcaatatagccgctgtaaaaaactaatacgctaacaacgaattctgtttcctccatttattcataccttccctaatgtctgcttttccaggtgaagtatctgaaaggtctttttcccttccatgctcttgcccatccttctggaatattctctgtggcagttatgcagacctttacaaccacatttcttgtgggttgtatgtgtgaaatcttcagagctcagaaaaaaaaaatctgatcaaaagcaacatttgaactactgaatttctttcttttcaagttcattcattcaatattatttgttgaataaatattcagcaaatatttattgagcatgtactatgtgccaggcattgttctgcatgctggagaagcctggggaagtgaggggaaagatgaacaaaaatccctgctcccattaagttttcataggcaagcaatacataaaataaagaggtaaagttatagcatgttggatgtagtaaaaagaaactacagagaattaagaaagaaagagggatagggaatagttttctggtttaataggatgattatggaagacttcaccgagaaggtgacctccagaaaggagatatatcagtcagagttcccccgagaaattgaaccaataggagatattcacccttacatatgtatgtgtatgtgtatgagatttattgcaagggaattggttcatgtgattatggaggctggcaagtccaaaatctgcagagcagatgtcccagtttgagttcaaaagccacaggctgctggtcagcacagtggctcacacctgtaatcccagcacttcaggaagccaaggcggccagatcacttgaagtcaggagttcaagactagcctggccaacatggtgaaaccccatctctattaaaaatacaaaaattagctgggtgtggtggtgcatgcctgtcatcccagctactcgggaggctgagacaggagaattgcttgaacctgggaggcagaggttgcagtgagccaagtccgcgccactgcactccagcctgggcgatagactctgcctcagaaaaaaaaaaaaaaaaaaaaaaaaaaaccacaggctgctgtagaataaaaaagaaccaatgtcttagttcagaggccatcaggcaggagaattctttcttactcaggggaatgttaacctttgttctattcagaccttcaactggttggatgaggccctcccacattagggagggtaatctgctttgctcaggctactgatttaaatgctaatctcatccaaaaacaccctcacagaaacattcagaataatgattgaccaaatatctgcgcactctgtgtcccagcaaattgacacataaaattaaccataacaggagaggagttgagtgagccataagggatctgtgggaagagtaaaatttctaggaagagtaaatttcaaaagctaagggcctggcttgttgaacaatgaggcagcaagtgcaagagggactgagagccacaggagatgagtagcagatgaattcggagtgcccttgaggtgaggctggtagcaggcttgatagaccatggacatggctttttgtctgcttttggttattttgttagacctatttcagggtctccaccgttgtcacattctttcctttttaagagtattttttttttctggttatacccatgaaaccttattttaagtccctaaccacaggctttagagatctatgctgtataaaaagtaattcatccaattctattatgacttatatatagcaatctactcatttatgaaacaaagaattccaggcatatcttgttttactagcctgtcctgagtattgtggttcgaattcatttgtggactcttgagtagggctgtctgtctataatgacaatgcatatacatgtagaaccagcttatgagagtttatgttttataaactgcataatagatttaaaagtttctccatacatatttcatgattcccacctcagagggcacaggaaatggtccaaagcagacgactctaacttaaaatgactgacaaggcatctgggtcagtgagctttggctgcataacaaaccacttcaaaacttagtgacttgaaaacaaatcactgttgagacaataaccatgttactgctcacaagtctatgggtcagctgaacctttctgctgctttgccttgggcttcattgatcccagctggtcttaggcaggtatctgtgttcagctagcagatcaactgaagtctggctagttgaggatggtcttacctacctggctggcagctgactggctggcagttgggacagcaggagtgacggggccctgtgtctctcttcttctagcaggctaatcaaagcttgctcaaaagcaggagcatagacttcttaaggcctaggcccaaaactggcatattgtcactttgaccacattttactgtccaaagcaaaccccaataactgcccagattcaagtgggaaagaagtagactttaagtgttaataggaggagctgaaaaataactgtggccattttttcaatctatacataatatgctaattaattgtatgtgttaacttgactggtccacagggtgcccattcacttggtctgagtctgatggcctgagaatgaggagagctgatggggtattacacacacacacatacactattgattctgtctctctggagaaccaagactgatacagatttttgtcccaagagtggttctagaggaagagaatttttaggatgagtttcctgaattggttctgaggtttctggcattggttctctcatctgattaggtttaacgatgctaataactctgtttccattaataaagagggcactgatagatagtccgtggtgtactctgtcaatagagatatataaatattaccattggatactcctaatcaaccacttataagaagcaaagattttggtgactgtgtatatgatgcttttgaacatgattggcaaagtaacaaatgtaaagagattggcttctattgtcatcgaacaaagaatgagctcagggtttgaattcccaggtcaaatgctgcatacatgatctcaaagctgctatgtctgccctcgaggagacctttatctcctatagccttaggactaagatcactgaaaatcaaatgcaggatctcatcctgtgactggctgaaccaacacaatttgaaccctcagcctcacaaggtgtctactgttaaagtcagtgtattaactaggaaggaatgcgttgctcaaagttggaatggagatcagcttcagccccgatgaagctgaggacattgagcccctaaattatgatgagggttctttgccagcagaagagccctctccagcctcttctaaggggattaatcctgcatcaccagaggaaactctaagggcctccctcaaggcagttgccatgcaagatgatgctgattctattcaggacccctctttgtttctagacctgtaactacattcaagtccaaagaggcccctaaaggtgacgtacaaagtgcaactcatgaggatttatgctatactccaaataagtattaagtatttaaattttctaatttataatagaaaagtttggaaaactgtgagggaatgcatattaagaacataggataatggtaggagaaacacaaattagatcaaaatgaatttattgatatggataaaggaagcagacagcatgcatttaattttgcagctcaggcatttggaaagtgctgtaatagtttgtttagtcagttggctgaaacatgggccagaaggtcacccacagtgagcaagttggaaatgctgaacttcccttggtttaatgtagagggagggattaaatgacttagagacattgggatgttagagtgggtttgtcattcaagaatgactcactcacattgggagagtcctggagacatacctttcaccataactgtgggaagtaagtttgtgagggagtcccagcatccttgaagagctctgtgacactctactctgtaggccagaacttacaatggaaactgcagtcactgaattgagaaatctaaatgtaatgggaataattggatcccagggtggcaggggccaagtggcagcactcgaccgtcaaaggcaatgtggccgtgattaccatgatgaacagtggagtcaggcagcaaccaaaattctctaactcacagagaaccatggcactggccagttgatcatggtgttcctggaaagtaaaagagataggctggtgactaaattcttttttgctctctgtaagctgaaaatttctatgtcaaataaaaaaaaaaaaaaaagtattacctgaatcatgaaagcatagagtcactatccttcaaggaattcccatacttgagccagtttatagacccaaaaccctttcaatgaaggggaggctgagtctctttgaggaaagactcctgtatattactgaaaatttatactgttcatctttctcccatccttctccaaatggacctatggtgttttaccaggtgactatgcattggagaaaaggaaataatcagacctgttggagactactgaccactggctctgaactgacacttattccagaaggcccagtatttcactgtggtccaccaggcagagtagggctaatggaggtcaggtgatcaacagagttttaattcaggtccatctcacagtgaagttcatgagtctctaaacttatcccgtggttattttcctagtctgaaatgtatacttggaatagataaattccctgacagaactgctatattggttcttgtgacctgtggagtgagggctattacagagggaaaggccaagtgggagccactagaactgtttcaacctaggaaattcgtaaacgaaaagcagtaccacattcctgaaggatggcagagattagtgctaccatcaagaatttcaaagtcgcagggctggtgagtctcactatactcccattcaacttacttgacgtgcagaaaactggatgatggagagtaacatggaaagtttaaccaggtggtgactccaattgcagctgttgtaccagatgtggtttcattacttgagctattccctggtacttggtatgcagttattgatctggcaaatgcctttatttccatccttgtcaataaggctcgtgagaagcagtttgctttcagctgtcaaggccagcaatacacctacaccgtcctacataaggggcatatcaactctccagccctatgttataatttagttcacagggatcttaattggctttcatcactagtccattacatagatgacattatgctgattggacctagtgagcaagaagtagcaactactctagttttattggcaagacatttgcatgtcagagggtaggagatatatctgacaaagtttagggaccttctacctcagtgaaattcctaggagtccagtggcgtgggacatgttgagatattcttctgaagtgaaggataagatattgcatcttgcccctcctaaatcaaaaaagacggacaatgcctagtgagcttctttcaatttttggaggcaatatattgctcatttgggtgtgttactcccactcatttatttagtgacccaagaagctgctagttttgagtggatcccagaacaagagaaggttttataacaggtccaggctgctatgcaagcagctctgtcacttgggccatatgattcagcagatccagtggtgtctagatttaatattatgtgtcatgtcccaataaagcttggaagtagatcttaacaccattgccatcacccacccacacacatccctacaagtgaagaaacggaaacctcaaagcaggtaagtgactggtcacaaaaatcacaggtaataaagccaggaatcaaacattatcgcagcatgctagaaagcctatctgcttttgatttctcagtcacattattttttagtaattcttaaaaaaaaaaaaaaaaagccttggccaggtgcggtggctcacgccagcactttgggaggccgaggcaggtggatcacctcaggtcaggagtttgagaccaggctggccaacatggcaaagcccggtctctactaaaaatacaaaaattatctgggcgtggtggcacatgcctgtagtcctagctatttgggaggctgaggcaggagaatcgcttgaacccaagagatggaggttgcagtgagccaagatcgcgccactgcactccaacctgggtgacagagagaaactctgtctcagaaaaaaaaaaaaaagcttgtgtggtggactctaacctaatcagggctgatttatatgttgtttttttctcacatattttcctcaatgttctgttcatatcacatagaatcactgagaattcttctctgacattcacagggcccctaagtactgcttcacagactgaactgaagcaatattaatgggtctcttcctagataagcccaagcctcaagcatagccctgcgcctcagtcagccaatctagaaatagggcaagcttctaaagatgaaagggcacagtctctgcttttagtaatctcactagggcaatatagccaagtggaatgaagagatgagacaagggctagactgtgtgacatgggccataggttgacagaagctccaaaaatagagtgagtgctctgaggaagctacacagtagcaagaacatggtgagctgggtggaaaacaatgagttaggtcttgcaggatgcctggcaaaggtgggacgtctgtagagggactggcttgagcaaatggtctcagaacaagctgtggattccctcttttaaagttccagactttcataacttcactttggcctgcatgctttccttttggaggcaatatcttcataaatgccataagaggaaattcaacacagaaccctccactgatttcattttctatttgaatttggcagagacccctttaagaccgaatctcatcaagaaaaatataatctgagctacatattgtactaaatcacttcccccctttttaaatttgaaatcagcttttcttttatatatatttattttgagatggagttttgctcttgtcacccagctggagtgcagtggtgcgatctcagcacactgcaacctctgcctcctgggttcaagtgattctcctgcctcagcctccggagtagctgggattacaggtgcctgccaccacacccaaccaaaatacaaaaatacaaaaaaaatttttgtatttttagtagagatggtgttttaccatgttggccaagctggtctcgaactcctgacctcaggtgatctgcccatcttggcctcccaaagtgctgggattatagctgtgagccactgcacccagccatcagcttttatttcatatgcatgcatagcatcctacaacaataactttaaaaaaaataagtcatcaccattttctatgattgcaacctatatagagaaatagcctggtgttatcctacaagacaatttccttaaaatgtgtgagtaatggctattaaatcattttatggagccatttctaaaataatactctttgtcactgttaccataattacttttagttgtggccatattttaaagaacagaatgctttatcgtgactgttataaatacaaattatttttccccttgtgggaatcatcaggctaatttgtttaccattttccttctaaaacagatcattattaaaaggaaatcagtacaatgattgtgattaagatcaacagctctcttaattctttgttctgttgaatatcaagttttttctgccttcctacctctgtctttccgtaagacaaatccttttgctggcaaggggtatatgtgtgcatgcaactcctgacttatatctccactcttacacgtgtgctaattgatcttaaaattaaagtccaggatgccaatgaaggaaataagctctgaaccacgcaggtcacagtttctgttggttgtatttgtgtcagggagctgtcagactctgcagtttgaaatttaagttctcaatggactctgagcgcatatccttgatgtgtgattcacacctgtggtatcatcatggggtcattttattgaaatgttgaacttgtttgcaggggccttaattctttagctttctgcaaaacctagttatgtgatgtgttctctgtttggggataatagagagtaaatggaaataagacattaacattgcccaacccctattatagttggtgttaataatctttgcctataggtttggaagtaccttggcttatataaccactattcagataaaacaaggaaatgatgacatcagtgtaagattgaatgagatttgaccactgcacatgccatgctttgcaatagtctaaaaacctggacagaatgatcagaaccatctaactcaagcccagggataagcaaacaatcagtaaaaaatgcttacatagaaagcgcatgatattttaatatgaatttttaatatttaattaattttagtggctattgtctaccttttatcaaataaacagctatttattattagaacttcttgctaatgattactgattttgactgtttgtaagtctagccttacaatttattcagaagtgtggttttaaacacataaagtgcttcatggcaatgcaaaatcttctactgaagtgttttgtattatttcgatttgaacttaagagattatgtggattctgtacgtaataggttttattcatagacttgatagtgtagcaggacgagccgcagacaagaacccctcagacaccgagttgtagaaggaaagggctttattcagctgggagcatcggcagacttatgtctccaaaaactgagctcccggagtgagcaattcctgtcccttttaagggcctacagctctaagggggtatgagtgaaagggtcatgattgattgagcaagcaggcggtgcgtgactgggggctgcatgcaccggtaatcagaacagaacaggacgggattttcacgatacttttccatacaatgtctgaaatctatagataacacaagcagttagctcaggggttgatttttaactaccaggcccagggcgcggtgctgggctatctgcctgtggattccgtttctgccttttagtttttacttcttctttctttggaggcagaaattgggtataagacaatatgatgggtggttgcctcccttaatagttaaatgatttggcaataacaacaggccgaaatataaaagagaaaaatttaggttggtgcaaaagtaattgcagtctttgcaattgagagtaatggctaaaaccacaattagttttgtaccaaaatatgtatttggatatatattctttaattgatgttaacttacacattaagtttttaaaatattagaaaacctacaaaatctgggttgaaaatgagtatttgaacttgaagcatggcaacctttcacccattttgttttaccaaattgtaaataaatcataacctggtaccatcacctagacagaaattttgtggaatatctacactataaataatggaacccctgtaaagtagtaactatttcaaagttaggatctcctggctttggcaaattttatttttgtgaaaattaaagttgggcattggcaacccaataccttttagtgttccactagaacaaaattaaatattaggccagtaatttgatgcagtggtatccaaacttttccatttcatgccctaaaaattagacactcacaacccccatcataggcatattcacttatttgtgtgttcatttttacgttgtaggtattactagactaacacatgtgttcatcataaatgaatgtataatatatatattttaaatgataaaatataaataatgagaaagaataaagatgaaaataatgttttattttgtttgttaatgattcaaaacaaatctttgccctccatatagagagtccatgtgtttgaatagactttattattttcaaaactcctcacttaacactttgatacaggaatccaaaactctgatcttaagtttggattttcttttccatatttggttttaatggctgtcactgctggggaaaaaaaagattcctcacacagatttgaagattaaaatggaaggtgtgcatcctttgccgaggctactgcttcattacactccttttattcattcccatctaccagttgtaaaggtttgactttctgatggatgcttaatttttaagtgcctgctaattacaatggcttgccactttcattaacatgccatacacttaaggcaaaactcactgttagctgtgagaaagtaaatacatatttcaaacagtcttcttcataaaattactttttaaatggattctcctgcaatatctgattgttttcacctcagaatgtaggaaaggagaaaacgtcagctctcaactctgccgttgtccttttgtttgccgttggcacaattgctaatgtggttcatctcaatgtctttgcagggtttagtccatttggtgagggtttgtttggttaaaatagataaggtagcctgtaaatccattgaatctgagcatgtgtacactgaatgtgttgaaacaagctgaaaagtcatcgtataagcaagggcaccactgtccaagcccttgaacgtgtgggacaggccaggttccatggctaatgcctgtaatcctaatgctttgggaggctgagccaggaggatcactttagtccaggagttcaaggcattgagctatgattaggccactgcactcctgcctgggtaacaaagtgagacctggtatcaaaaaaaaggacgggggaggggaaaggtgtggtgccctcttctttcctcaggtctcaagccctgtaagtcactaacaaccttttaacaaactaatgtggtgccagtgtcaataggtatgagtaaagctaatttcccttacaagtgaaattctagtacacttttcccataatccaatagatcatctttccttttatcctctgaacatatgcatgcatcttaaaagactacggatttaaagtactagattaggccaggcacggtggcacacacctgtaatcccaacactttgggaggccgaggcgggcggatcacgagatcaggagattgagaccatcctggctaacatggtgaaaccccatctctactgaaaaaaaatacaaaaaattagccgggtgaggtggtgggcgcctgtagtcccagctactcgggaggctgaggcaggagaatggtgtgaacccgggatggggagcttgcagtgagccgagatcacgccactgcactccaacctgggcaatagagcaagactctgtctcaaaaaaataaataaataaaataaaataaagtactagattatgtttttcttcccaattaaacagatcatgagttcttttggtgactagggtgttgtggcattttggaggcaggaaagatacaggaagttcccatgctataagccttgtctctttgaacatatctaagcatattagatctgttaatttttgcttcatatagtttgaaggtataattattgggtgtatacatttttagtattgtttctcaaatacattgatctctttattatgaaatgttctttctgtattttcttgccttaaagtaatgctgttcgatacagtagccattagccatgtgcttatttaaatttaaattaattaaagaaaaatataaaaattcagccccgcctttgtgctagtcacatttcagatgctcaatagggctattggttaccctatgggatagcacagagaacatttccatcattacagaaagttctattgggtcgggctgccttaaggctacttcatctaatattaaaacaactatatcaagggtttttttggttgacaattatatggagaattaaataaatcctgaatcacagatgaagattttagcatatccctctctgttactaacaaaataagcaggaaggaaaaaaaaagaaaatcactaagcacacagaggatttgtttaacacaattaaccaacataatataattcacatatttaatgcattacattcaacagttatataatacaatacgcattaagtacgcaatgcggacacattggaagatacacctggctgccaagtgtcctgtagggaggtgttgattgtagagacacacagcaggggctatataattccataatcaggaaacccagcaaaactggtatcacacgaaggaattgcaactattgtattagtccattctcacacatctataaagaactacctgagagtgcgtaattaataaagaaaagaggtttaattggctctgcagcctgtacaagtagcatggctggggaagcctacaatcatggcagaaggtgaaggggaagcaggcacttcttacatggctggagcaggaagaagagaataaagggggaggtgccacatacttttaaacaaccagatctcatgagaagtcactcactattatgagaacagcaagggagaaatctgcccgcatgataaaatcacctcccagcaggcccctcctccaacactggggattacaattcaacatgagatttgagggaggacacaaatccaaaccatatcacctatggtttgggttttggtagcacaacactggtacaacctactactcagggatcctcaaactttaatatgcatgctaatcaacttgaggttctattaaaatgcagattttaatagagtaggtctaggtgcactttgtaacaagtacactttgttactgactttaaaacgagctcccaggtcatgctaatgttactggtccgtggaccacactttgagtaggaagattctaactcaaaagcccaaactagtagcttaaacaccaaatcatgacagaagctgtttcccctggcttgtatcatattgattaacacagtaaagaattagctgctgacatgtacaaagtgtgaagtttcacataagcataagcacctgaagcgtctcttgaagtctgggaagatccggccagggcaagtctgcttccatacatggtccatacaaaagtccactggagcagagtagaggccactagctttcgagagcccatgatttatccttcaccataagtcccacctccactacactgacaccttgccaaccatccatctcacttctttatttgcctttctaaccttctgagacaaggactctcaacctaagctaaatattggaatcagaggagctttgagaaatactgatgttttggtctcagccccaaagatcttgatatggtcatttcaaggggtgggaaaagcctgggcattttaaaagctacccaagtgattctaatatgaagccaaggttgaagacttctgtttaaatcaatttagtgacactagcaagattctcacacaccatcctcagacattctgattctgaagctcaggatcaccacttcctaatatttgcaggatctgagacaaaagaaagctctcaatctatagcctttcaccttgtctttctacttcccacccactcctatactttcttgcaccatgaagaatcttctgtatatagaattagacacacatccaagatctgtccttactccctttcaaacacccagcccttggtcactcttgaacttagacctttgcaaaatgactgcaaggtctgccattagaggaagaggaagagggcctaaaaaggggtcttggggccagttgggaagggaattttggtatcttgttgaagtgttttctgacaccaatctcttctccaacatcggctgaatgtcgaaccattcaattcaattttgatgcacctggatttagggcagaccccacagcttaagtcccacaagactgcccccacttcaggtgccagttgcaagacttggaccacccatacttctgaccaaccagctgtaagtcagaggttcccacaacactgtcctcagcttcaataatttactagaacagctcacagaactcagaaaatccactttacttacatttagatttacagtttatcaagaaggatacagatcaacagccagatgaagaggtatatagggtatcgtagtctgctttgtgctgctataacaaaatgcctgagactggcaatttatacgaacagaaatctattttctcacagttctggaggtttgaaagtccaaaatcaaggcgccagcaggttcggttgtctggtaagggctgcatcttccagaggggaggaacgccatgtcctcacatgatggaagacagaagagcaagagagaccaatgctatcaaaagcctttctaaggaccttaatcacactcatgaaaaagggccctcttgacttaatcacctcttgtttgccccacctgttaataccatcacattggccattaagtttcaacactttaactctagagggaacacattcaaatcatagcacaggacaaggtctggaagagtcccaagaacatgagcttatgatcctacggagttagggtgtgctgccctcctagttcatggatgtattcaccaacctggaagctttacatcattatttaagagtttttataactcaatctttagctctcccaccaggttagtgagggaggctgaaagttccaaccctccagtcagttgatctgtctggtgatcacccctatcctgaggctctccaggggccctattctaaatctacttattaacataaattcagatatgattgaaaggggtttacacaaggcctccttatcactgtgaaaaacccaagcgtcttaggaggtctatgccagaaacctgggacaaagactaaatatatttcttatatcacatctgggtaccccagcattagggaggccatgtctccatgtgcaggagtcatagtcttgtgtactaagctactcacctcatgaggagtgtgtggatgaaggagggctggggggccatgagggcccaagggatgggcctgtcttgcccacatctggaagtccgggatgaggactgagactctctttgtagcaggttccccccagtgattctgatgtcagttgtccacagggtgcacttagaaagacaaactctgcagaaggatcagagctaaagaagaatagcttcccctcttttctctctgctgcctaacatttcttagtactagtcagagcttgggagccacacttggaatttcaaaagaggaatttttcatgcttttctaaatggattgcattttgggggcttggaagccaaacacttagaatctgtaaacagtttgtcctgggagagaatggctgcaggctttcagaacaagagagggaaatttaggctgactgcaccctctgcttctcaaagctctttctgctaaaatgctatagttatatgtggtcgtagaaataaaagagaagccaaacactcaagtgggcactgcttcccattttttgactaatgagagattattcaaaatcttgatattgagttcttactacctacccaagcactgagctgtcttctgtaatcatccacaatatctatgatgtcagctccatcattatcattttatgtaaggaaactgagatgcagactggccactggctcaagctcatacaactattcactgacagagttaagaaccaagcagggccgggtgcggtggctcacacctgtaatcccagcactttgggaggccgaggcaggcagatcacctgaggtcaggagttcgagactagcctggccaacatggcaaaaccccatctctactaaaaacacaaaaattagtagggcatgatggtgtgcgcctgtagtcccagctatgtgggaggctgaggctggagaatcgcttgaatctaggaggtggaggttgcgttgagccgagatcatgccactgcactccagcctgggtgacagaacaagactccatctcaataaaataaaattaaattaaaaattaaaagaaaatataaaaaaaagaaccaagcagggctgagcgcgatggctcatgcctgtaatcccagcactttgggaggccaaggtgggcggatcacgaggtcaagagatcgagaccatcctggccaacatggtgaaacctcatatctactaaaaatacaaaaattagctgggcatgctggtgcaggcctgtagtcccagctacttgggaggctgaggcaggagaattgcttgaacccaggaggcggaggttgcagtgagccgagatcacgccactgcactccagcctggcgacagagcaagactccgtctaaaaataaaaaaaagaacgaagcagcccggccctagaactcatgtgctctaaaccactactctaaaccagctctttaaaacacgtaagtgtaaatgtgcacagatttcaatttagagctgtgtgactcccagcagatttcttttttcttgagcaaaggagatgccactgtgaatattaatgtctgtcatagccagagcagacactcttcagcttttgggcaaactaaaatgctcaaaaatacccacaggcacaacattttctaatcgtgcttccagagccaggcagtgtgttcatgcatgtaagacgctgtataaatgtaggtagtagcaccaatagtgctcatgaattatggatgaagaggaacatccagagtcaaacattcctgagaaagcagaccaggctccctttactgggttaggaaaagataaaaggctaaacttcccaaggcagttgactggtgatttttcattctaacatccgaaaaaataggaataaagttgctatggtttgaatatatgtgtcccttcaaaattcatgctgaaatttaatccctagtaaaacagtattaagtgaggactttacgaggtttaggtcatgagggccttacctccatgaatggggatagtgcccttataaaagggcttgagggagcctgctttgctctttttgcccttctgccatgtgaggacacagcaaaaaggtatcatcttggatgcaggagatgagccctcaccagacgccaaatcttctggtgccatggtcttggaattcccagcctccagaactgtgagaaataaatttctattaattataaattacctggtctaagatattatgttatagcagcaggaatgaaccgagacagcagcctatttcagaagcctgtctctgatgctcctattccaaccaaaatctttaagccagagatcgcaaccagtaacctggctgaataatccacaaacatggtttattgtactcacacattgttataatgtttttttcttagtgttctttcatcttcttgttgaacaggatgccaactttaaaaataaggagatatcctttaaaaatgtttccttgctttaattgaaatattcaaagacctggctcactggggccatgttccaatggacttggcagcaattagctggatctgaggagtggaatccccgattagatgaccttgtgtgctccctttagccacagtcaccatcactgtttgttaccttatactcacataccaccactgactaccaccagtgcttttcactctttttctttacctctcttcctcctaaagtcatttgcatttaataactgctaatttcctgttattcaaggtccctagcaatttatgatatatgtgtttgcttatataaacttgcttcaacaggccacagtagcctaggaggtagtcattgcttgaagatttatactgggctgcaaaataaccctgagtgtctactcaactttcagttcgaagtgccttatcctgtatggtagtgggttactttttgcatgccaactccatcatatggtagcagatgcctgggactttttgttgataaggattccaaggctatctagatggcctggaagtaccactaagattgattagtgatgtctgccatagtcaccccagctgctgctatccatcagaagtcatcagccctgtgcttccatctccatttctttttttggtttttttttttttcatttttttcattttttttcattctgagtgtcatcatttaggagactcacacaaaagtaagagaatctttctagggaaatgttctcttttctttgcttgaactgaagttgcaatttagaggcagttacccttaaccctggcatctttttcccccagtacaagtgttcatagaagcaccacatgtaacaggcaaaaactggaaacaacctaaatgtccatcaacagtggcatgggtaaatgaagtgtggtgtattcacatactttatagcaatttttaaaaacccgactacagctatctacaacaacaaaaaaagaagccagatgcaaagaactatagactgtatgactgtttatataaagttgcaaaataggctgctgtctcagttcattcctgctgccaggttttatctctgcctcctaattattctgtcatttcagccacatctggggttactaagtgtcatttctaaattgtacctactgacattagcgaatatctttttgctggtctcccaaaagaaagatccatcatttttctaactcctaattgaagaacctaagaaaattgctgtgttacaaagtgttccttttcatcaaccacaaaacaatcctccaggacagagttgagcaaaaccaattctgtccaatccagtctgagtctaatgacagaaactactctgagttaccttattcctgatattccaggactgacatcagggcctctgtcccaagaagtggaggaaggcagaactcccactagccatatcccagcctccttaagatgggcctgtggtcctgggaaatctgctcttctaacctttcctttgtccacagaagccacatcagtagagggtcagttacagacaaggggcacacagtgaataaggaggcactcacttcttggattaattggcttagtgtgagaaggctcacttttacatcctaagattggaaagtgccagaggcccccacaaatctccaaaagcatagtttgctctccaattttctcaactctttcccggtttgtaatgtttattgttttcttataatatttaccaaccatcttacctcaccaatgctagatcctacaggtaacagaagcacagtataccagaatgatcacatccaatagcccctggctggctccaggtgtcatgaagtgacctctgattttgttactgcccctgagtggtggccagaagttacattatgtcagtttacagtgtggcagcccccatatccattggggacatgagtgtcaggcaggtcaggtgagtgtcaccacctggaaagtggaagcatctctaaaaacaacttccacagaatgcatgaatttacagatgatatgaaaacatgtgcatattgaattttctgaaaaatggcttatcacaaaatttaaaaaaagtatttatcaaaggaactttgggcacataaggaaataaatccaatagtatgctcatgacaattagttatataaataaaataaagtaggttattagtccatataagatagcctcaggaaaaaattaaatgcccagataaaaagtatgcagcttgacaaatttttacagaatttatgaaattaccacttgtgtcaagatacagaacattatcaacaccccagaaacttccctcgtgctccaacccagtcagtactacctccatccggaagtaacagctattctgatgtcagtcaacacagagattagtttttctgttttgcaactttatataaacagtcatacagtctatagttctttgcatctggcttctttttttgttgttgtagatagctgtagtcgggtttttaaaaattgctataaagtatgtgaatacaccacacttcatttacccattccactgttgatggacatttaggttgtttccagcttttgcctattacatgtggtgcttctatgaacacttgtactgggggaaaaaaaatgccagggttaagggtaactgcctctaaattgcaacttcagttcaagcaaagaaaagagaacatttccctagaaagattctcttacttttgtgtgagtctcctaaatgatgacactcagaataagacgctttcttctccttccacagtcccctgtgctgaggcattttatgtgattgtgtgtgtaagcttcaaagcgttattcaacaaagaagcgctgttctcccaagctctaaccatttactcgtaatgggcatatggtatttcgagtgctgtactttactatttcaccactagagggcaagaggagccccacaatgcttgacattgccagatctgcagtcaaaatgattaatcatgaggcaaaaacaagaagccagagggaaaaaaggaagagctcacaaaggcaaaataaacatccataaacttaaactttcctgggtagggaagatctgaaaaatgtcacccatgagccactttctaacactcgttccatctttctttttccagtgtgcaaaactcaattgcacagtcctcagttgctgaaactaccacccaacagggtgggactagatcaggcagacagatctcagagggcatttttttttagcactgcctagagccttggttattaggaagccgagaatcttgcagaggtcccaggcctcaggggctctgaacaagcaacagagagttctgtgatttcttcttcattctaagtaatatttcttccaataacaccatggtgtttactaaaatcaaggcactaatgagtaaggctaccagccccaacacctctcctttttctcctcttctcccgggtccaggcccttctacctgccacaaacttaatcaagattacagaatggagatgtgttgttttttgcaaggggaggggagtagggaaattaattacgaagccaagttgctgttaaactatttataataaatttctactggaaaaggacctttggctgacaatcgttttcttctgcctcggcatgaccaaatacagtaagaattcaaaaggaaaactgaaaagcgaggaagagcccacagctggagcagtctgttttcacgtctccacgctggcgaacgacaaactcggcaaggagcctcctgtgtatttcctgtcctcgttatctcagttcttgctctgaagggctaagaagccttcaccgttagccaagactccttcgtgcttcagcttaattttccttgcataattttaaatacagatcatgtctacagtacagcaattaatggatagcctaaagacttattatttcaaactaattgatatgtaggaaaagtttaaataacataacggagaggggaaattttaaacgatgtatgcacaatgaatttaaaatttctctctgttgcagatggtagcaaaaacatatgattaatagggggatgtgatcaaaatgtagaactgacttggaaatctttctctttttgatattcttgagcatatgattggaaggaagaaagattcagacatttcagaaatggggtaaggggtgcaggggagagcagattcttccccccccactcactcccaccaattctagggagttatctcacaagataaaagaacacctgagtatattttgagttgtgctgttaggtcagaaataagaaatgggagaagaatgccattatttccattctaactctttggtcaaatccccctcttgagataaacttgagagagaagtctacaaagaccaagttcacccagctgcagcagaacctgttccaagtcaccagcactcccagacccaggattccctccaaattctaagaaatgtgctgtgatgaatcacctcactgacacacaaaaaaacaaaaatctttctaatttccccattcacattccagcaagtttaataggaaagtttagaaaactcatctgaagaaagaatactcttcaaatgggagagagcaggaacattttgttctaagaagggattgagacctaatgatgccagacaacattttaaatatcagaacacagcatttgtaagaaaatagaatctgcttcaaccataaaccataaggggggaaaactacctttaaaatgtattttcttcatatcaaattcatgtcataagaatatctgaatgacttctggccaagtcacttaaattttgtggtcttcagtctttttggtcttctcagatgtaaaatttgccacagactggttattttttagaaccctttcttcccttctgttctcctactttatttaggtagctctacacacacattttgaaaattggatgaacaacctccttctcattggtccatgcaagaccatattactgtatttataatataatacacacccatatacaccacaaaaactacaatactggtttctccccctctggtaccctggcctttcattctccaccctctgcccttcaaggtaacaatgaatctgaaacgtgtgcatgtatatattcctgttttttatatttacatggttatagatatacatgtgcatatatatcatgcatatgtattcctataacactttatttttttatcttagttgttttaacttcataaaaatggtatcatatggagtatcatattgaaatatgataatgtaagttaaaggaccatactgaacctatactgtataaaatttgggggagcctacaatttttcacttaaaaatatgttgcttactttgggaggctgaggctggtgaatcacttgaggccaggagttcgagaccagcctggccaacatgataaaaccctgtctatactaaaaatacaaaaattagctgggcgtgggggcacacgcctgtagttcccagctactggggaggctgaggcatgagaattgcttcagccagggaggtggagtttacagtgagccgagatcacaccactgcactccagcctgggcaacagagcaagactgtgtctcaaaaaaataaataaataaaaagagccagacacaaaaaagtatatacattattattcagtgtatatgaagagttagaaaatatgctatcttgggtaggggacaggatggctagtgattggaaggtggcaggtagaggtcttatggagtgctggtattgatctgagtgctggttaaatgggtgtgttcactttgtggaagaaaatcctaagtccatgaatttgttgtatcagttagctattgctgtataacaaattccaccacaaaactcaggggcctaaaacaataagcatttattattatccacaagctggtgagctgggaagttctcctggtcttagttgttctcacttatgtgtctggagtcaactgagcatgaggtggacagctctgctggtgatactggttggacccgctttcatgtttgagggtcacttggatgtaggttggtctaatatggcctctgctagaacgaccggatctctccacttagtctctaatctgtgaacagacacgcccaggcttgttcacttgctggtggcagggtttcaatagcaagagtagaggcacatgtggccctttgagaacaactcagcactgcaacagtatcacttttgtcatatcctattgacaaaacaagtcacaaaagaggagtgaagaatggtgggtttttgaaaactcaatctaccacacttctcttatgtgaacttctctctgtgtactaatgaaaaaaatttaaataaagtatatctaagtataaggtatctatattgttaaatgttgctatagtttattttgacttattctattccatgaatgtatcgcacttatccattctactgtcagtttgcatttagtgatgtccagttgattgctgttttaagcagatctgctgtgaacatgccatctcatatctcctagtatgcaaactctgtaccagaagttttcttggttgtataccaaactgtggaattactgggccatagggaatatgaatcttccattttacatgatgatgctaaattgtcttctgaagtaactataccactttacactttcttcagcaatatatgaaagactgtattaccctgacacttgccaatagttgatattaacgtcagacttcctaatatttcctactaagatgagtatgaaatgatatctcaatgtggtctagatctgcctttttctgatcagtgaagaaactgaccatcccttctatttagtttgtttttgttttgcctttagccacatgttccttcttaagcaaaatgcctctttgtatcttttggtaatttttttcaattgagtgattggtcttctcattacttcataacaattctttatatattctcaatactattcttttgtcagatgtgtttgttgtgaaaatatttgcccagtttatcacttgcttctcaccttattgagggtgtcatttgaataagtttcataattttaagtatttgaattaaatttttatttaatttttattgttagctttacttgaggcctatttagccaatccttaactaccccaggatctgaaatagattaaaggtttagcagtcaaaacataaactaaatactgtttcatttgcactcacacacacacaccacggcctgctcttgttacaagcagttttggtaatgcggctcctgtgttcattatgaaatatttaggtatggacttgtcctcagtaatagcatctaaatatcacaaactcaggaaatctaaattgttctgacaagttacaagaataatttcaaagaacattttcttttggcagtagaccctgatgttgtgtagtaatggaaatgtttaaattccaatgataggacagggatggccctggctagaataacacaaaaatcattcaaatctaaatggcataaggctgcagcagtccaagtgagatccctcggggagtcttggaccttttccaagatgtaggctctctacagtgtgagtgtgcagagattgtatgattccactggggtcacttccactgatgggttcaatggactacagcactgaccttcacatggcttgttttcatagcttcgagtcctaaagggagatagggtcataggaatatttcaacagtgtaaacagctcacaagtcttccttgctcacttacttagaggtgaccagatgaactgaacataccctaatgctaggctcttaaaataggatcttgttttaaaaaggggttcagtagacaaagaaggccattccctttttcccaactcttgttcttagggtagtgttctcaaactctggcaatttgagtgtgcaaaaaaaaaaaaaaaaaaaattagagtagtggaagtgggacagatagttcctctttagcctcctgacatacctcttgtttggagggataagataatctctcagattgccacctgggcaaggaaactgggcaacacacttccaactcagaagccctgaggttggtggcctgctacctctttgctggtccctcttcctcaaggtttccgctttggaagtagggactgattcttaattggttcatctacttctaaggccagcacttaggaagagttagcttgttcttgattggctcaagaactttaattaataaagaagcaccgaatccagaatatttataaataacatctgctcacaaatagaacattgttccaaatagttcagtctaaacactttcagcttcaaatccacattaagaaaatcataacaattacctttaaactcatgtttccaaaaatgtgatgtgtatgtggattacctgtggatcttgttaatatgcaaattctcattcagtagatctggagtgggcctgaagtgatactactggtcctaggaccacactttgagtagcaaggctttctaaagttctgctctcccgcacagctgaattgaataacttttccttctagagatggcatcatggttagcttttgaaaaccttttggttttttttttaacttcagtcttctagtaattcaagaaagctggctattttttcaatctttctggatgttttaaggatctccttctaattctgaaatgttgctcaggtatttcttgttgaagtcttttccacagggtagactctagcttggggtctattggagcaagttaaatgtcttcaaaggtgatgggttattcaactgaataaatgttttctagaatgtggtgaaacctggaaaatacagtgggagtaggagagggaagaaaaaaaaaagacataatatacttttctccactctacctaccatgataatacatattaatcttgcctttattctttctttattgtatataaaagcttccactaactttccattctagggagtcattgagagaatataaatatgtgggctttttgttaaagcctgataggagaagagattattataagtaattggagactgtggagtcagaataactgagtttgaattctgacttcatcatttaccagctgtgttgcttaaccataaaatgctcataatatttactccagcgaataatgggagaattcacagaggtaatccttgcagataatccctgctaatcatttaacctagtgccaggatatagtaaatgctcaataaatatttatagtagtagtcattgttatttgataactattacagaatagctcccaagggcctactgaagaaaagctttgtgcttaagacactggcaataagttcatttccatatggtgtaacttgaagctttggttttatagattaactcagagacaagtcctaccacagtgattcacagttcctgaattcaaaacactgtgcatatcactgatttggcatttcaccttatatgactagctcgtgttattatttaactttgccttggctcactaattttattttcagtttctaacctttaagaggtaacagttttatactgttcaagactccccaaaccaaataccacagagccatttgtttacattagtaggtccccaataaatattcattagttatttcactgattaattaaagtaatccattcatctccacagggactcaggctggctgaatcaggagagacatcttcagatctattcctctttgagaaattagtataatgtcagtgcattctcatgtgtttcttgaattatgagctccctgatgtctaaagaagactcacagggaagagttcatatactgacagaacaatcattaattagttttcaaactagttttgatttgaaactaagtaatttcaatcagttttttgactttcaactcagtgttgtgacatcatggtggacacaactttcttagaggtatcaataccatcatcatgtccatgtttgatttgacagacaaatattgcaattttattctgttggacattttccaaagaagttggttactgatttattaaataaatatacatattttagggtagtggaagaagaaggtgaatagaaattaatgggtgagcaaaggtgagggaaaaccaaatcaccagttttctttctgattatattttaatctaaaaggctatgtttttaatcaggttatatgtcttgataagtggcgtttctacttaaaaaatgttggttgtatttgtatcccaagtaggaaatgcaaacatacttgtataaagcaaacaagtttaacttgtgtgtttgtattaatgatatgtgatcaaggcacaggaaatgttagtaaagaatcatacacttattatgtttgtttgggacagaacaaaggataagtcattagttggtgagttcagtcattttctttgagataaaacatttggttaaaaggcaggctagcccaggcatcatggctcatgcctgtaatcccagcactttgagaggctcacgcctgtaatcccagcactttggaaggccaaggcaggtggatcacgaggtcaagagattgagaccatcttggccaacatggtgaaaccccgtctctactaaaaatacaaaaattagctgggcatggtggcgcgcgcctgtagtcccagctactcgggcggctgaggcaggagaatcgcttgaacccgggaggcggagcttgcagtgaggtgagatcgtgccactgcactccagcctggtgacagagtgagactctacctcaaaaaaaaaaaaaaaaaaaagagatcaacttgggcaatgtagcaaaaccccatctttataaaaatctagaacttaaataaaattaaaaaggcaggctgatggaaacaatttaattaacttgatttactgggaaacattgatttattggaaaaacaatgaaaatgtacattgatttattggaacttgattaacttgacttattggaaaacattgaaaacatacattgggacaactggatattagatatttattttaatgcagaagacttttctttaaaattgtatttcctttaaaaatagactggcattatgttattatttaattattattttaatgcaaaagctattttcttaaggatactatttatatttctgctactgaatacagcacagtaatatatttcctcttgtagaatacatttagtcttgttttgatgggataaactgcttttgaatatactcactatgtcatgcatgatttatttatttaaatttcagcataatttttcttgacaacctgttctttcacttgaaatgttatgtaacaaaaacaccaggaccaactggcattttagtttatccgtctattccatatgctgctggatgaagcggaaaatgaatgtgtatcatcactatgctgggcacattttattcgcagcctgtcttttctcctgtacatcaatttctcttctccgtttggaaatagcttcatagcaggttaggtctatagaccttaacctgagtgatcacatataatgtaacaggaatctaattggctatggttagagtcagggaccaaaatatattcaaacttacttggattgctgcttgaatataatcacttcaagtccaggtagaactatttagactcagaaagaaattgatttttttaaatctaaacatagttactgggtaatttatgatagatctccagcccaaacatttcataaacaagtcaaataaggtcagcatgcatcaaggactagggcacattaatccaaaactacaagaaaaccctgcaatgtgtccactcaatatatgccagccaataaattcaaactaaggactaagctaaggtcttcatttgggttcccccagaaacaaatcctgagatgaggatttgagtataatagtgtttctgagcagtggtcccaggaaaccagcagggaagtagagaagtgaagcaggaaagggagggtagcaattaaaagtgtggcttttctcagacaagttacaaatgtgggcaactggtgatcaagcccagcatggaattctgggaaaccatgtagactatgcaccttagagttatttcttgcaaagggtgagggagctggagtctatatacaccaactgagcaggcagtttcagccgtttttgcaccctgcaagagaaagcaagctgttggaattaggacagtctgcatgacaatggttaggccaaagagctataaactgggcactaacaatcattagcttcaaattggatgagaagttcgccaagattataatgctagagtctccataattcaaatttcagtggcattaaacccacacctgcatctgacaataatcaagtatgtttgggtttagaaaatattttccaaactgacactacttttttggcaagacttagccattaaatacatgaatgatcctcaacaattcatgtaaatgagaatcacctgcaagccttcttcaagctctaaatcaatagttctcacactttgggattcatcagaatcaggtaggagacaataaaacacagatgactgggctcccacccccaaagcttccgacttagtaagtttagggtgagcctgagaacatgtgtttctaacaagatcccagatgaagctgatgctgctgttcgggagacctcaatttgggagcttctgctctgtataacctcacacaccgtacttgctcctgccctaatcagttttgtattttaccattataaccaaaagaagtacattatattcttcagataaagaaaatgttaagaggccttgattttcaatctacttctaactggaagagttaagcaaaggaagttttttctacctctgaagaaggcaaaccacacaaagttggaatcttctatccagagttgaaaaccctattatacttataatcatttttttattaacatatactgaaagatggtcattcatagcaagaactcataggtaaagattaagttggtagggtttctgagtggcattttacatagcactatgaaaaattatgcacatgattatcttttcttattcatcactgatgtatcaagagatatcttcaattttcagaatgttttatttttcttggcatacaattagacaaaatatttcagttttcaaaaaacaattcagagttcttattatttttcctcttttagttattttaaaatttgatttgaagtgctgcaaagagaaagggggaaatgatgtggtaggcctttgatgaagttaagtggcagtcgcctggacaaatgtgcaaaaagactggcattcagtaatatccagctcttctggtcttagatgatttctattctgtgatgccaaggagaggtagtcactccctcctttgtgttacatttgtatgttgcatataattttcccatgtatattgcagtataccatgtatgttgcatataattttacatatctcagcataacaccttattattttatgtttcacattctcctactagtcttgggacttcctgaagccagggctgtgtctcactcatgtctctgcctagcacctgtcacagtgctaggtttgcagaagtacacttgataaatttttggacacatgaatgaataaatcaatgaatgtgtgagggagaggaggccacaaaaagcgagtagatgtaaatagagaatgagccatgaatcagtggtattggccattcaattcagtattccaagtattgcagtatgttcccatgatttggaattaggatggctctctggctgacatgtcaaccaagaactagaacaggcttgttagaactagaacctagaagatttttcctgtcactggtaagattagctgtagttttctctaaagccatttacccttgtgtaagtaaggatgcctatgatgcatcagaatggcttttaatctcctaggttgagtgttctgaagaaacccccaagttttgggaagcagcgccagaattatatatgtcaggatatggttatctgatgggaagatggaaggagaaagtaagatttagcagaccagctctgccttgtgaatctaagcagaagaaaaacgaatagtgttttaaaactaatttgcaattgtactgaattgaagtcaccggttcctgtccttataagagtaacttcactgcggccatagattctgtatataccttaatccagtgataacaatggaagaaaagggagttttttttcatccttgcactttccttgtagaggagaaagagataaacattgatggaaagtaaaagttcccctgggctttataacactagctctttctttctcatagttataaggtagttataaagtactcaagatttatagttaggattattctctaattctactttaacttcagaataaccaaaaaggcccccagaaatttaagaggccatccttatggcataaacattggctaataaagattaatcataaataagagaaacactcatatctgcatgtatattcatcattcccctgacctcaaaataaatcatgcaacacaaaatatgtatgtgagaatgtattggttagcataatactggctgctgtgacaaacagtaccaaaatatcaatggcttcatacaatagaattttatttcttttttgtacaatagtccaacataagagtttccagttgatgaacagtttatctcatcatggcaattcagagaaccaggttcctttcataatgtggctccatcatcccctaggatcttgctggaaaggggaaagaaatagtagagattccccatatgtccccaaaaagccctgccctaacttttcattggcaagaatttttcaaatggctatgcctggattaaaaagtggtagggaggacttgtaaacattgtccttggatttggcagctgcacccaggcacagcagacaccgtggacaggtgcctgcaaattttgaggataccgacttattttctgcaatgtagaccaaaatactggaatccaaacctgctaaatgtagaattattctaaattgactgctactcacaaagaccctaaagataaaatcagtaaagtgacgactttgtattccaagtcatctctgtagacctcttcgagaaatggatctattaacaaaaggatctgggctagaagacttacaaaagaggatttctataaaaacaacttgctattcaatttatctgacttttcattccaaacccgatgtgtttagcacagttacatcaccacacttacgtgacgaagaaggaaatgggaaaagagggagatgtccaatattctctagcagatgccttttattcaagaataggatcaaaaatttacctgggggtaaggaaagtgtcttcctcttcccagtgatagttgccttgttaaagactttagacaccagcgcaatgtggttaagtctccactagtgcaacaaagaaaaggatagaggccagtccctgaatagggaggccccagcagactttcagatggttaactatcaagtccaaagacagacagatggaatacattacccaaatactccggaagttgcaaatcgacctgcatggtgttttgtaaatttctaatttaaggcaacactgacaaattagaaggtttaacacaaaatccagatttctggattcttttgaaaaatcaaaagaataatctagttagtagaactagttagtagaactagttagtagtaatctagttagaagaacgggtgtctgctgtctgtaaccacccagctcctgtcactcgtttgccttttgatctggccctgcctcagtttgctctccctgagaaatcccatcattgttttcagcttcaccttggggggagaattcaagcacaacaagcaggcttctcaaaatgcctgtgaggccaagaaacaaatgtctagtttcctttcagataaaattgtaaatactcacccaaaaaccacagcaatttaagcaggagacataaacatcatatttagaaggagggactatgtaattaggacatactcccttaagcatcaaaatcaattatcctgataaaaccctaggacggctaaccactcttgaaatatacatttataaaaagaaaaagaaaaaccaaaactaattttaggtgatcgggagaaggatgttctccagggacataactgagttcattctaggacatttgattcagcctgtcccttgttttgtaaatgccatgcacaggctttgagtcgagaaagtggttgtagctagggctcaagttcagtaattactaatccttggttaatcttaaaaggagttatcataaaggcatgcaccaatgaggagactctgatccaagctgaggccaacacaagggcaggacccccacaggaaaaagcctttggagacccaagacttcctgaagaggctgcttcatgggactccaggttctctgagatggttgcttgcaccgtctgcactattgaccttgcttctaatgtgactcggtgtaagaactgaattcataatgtatgttcagttctttctggttggtggcattccacctgattgaaaagaaatacatccttcatctaaaaataattagcctctgaatggccttttatttcaattgcccggagggcttttattgattttttttcagggtttgtgtggttaagagaatgggattcttctggtggtgtctttcttagcctctctcgaataggctgtcatgcccttgctcctcatgtgcggctaaatcagaagctacaaagtagtgacttgcagactcagttgggccttttattggactcttggtatatgttaaaattgctgaatttgagtgttttacacaagaaatacaattccacttggctacagattccactacttctcaattgccttataccagatctcattcacagatttgtgttgcttcttgagccccatagatatttgagttcagagattctgaaattaatatacatgtattaagttaatacatgtaaggtcctaggaacagtgcctgccacacaataagcacttaattaattttaatgttactattattatagtaaataattattttatggttctatatttccttgtttattagcaatttactaggttggttataacccaagagatttttttctttttcttttaagctatgatttttccttattccagttttccatttgcttgttcttttttatggtatccgattctttacagaagtattctgattaaattagactgtacttaatggaaaacagaaaaacaactagctgatcaaataaacatttcctaaactgaagaatgacacagagggagtgaaaaaccaggatcttccaagtatgacagacacaaagaaaagcctgtgatgatttagaaatgtgctgggctaattgcagctggttgagggtcctcgttgttttccataaaaccgtattgtattatgaagaggacagcaggtcaataagaccctgggccatgggacccctcttcagcatcacttttcagtaaaagacaattcccgattattttgtgaaagcaactttgaaatcctaaacatgaaaggaaaacacattggaatgttttgttatattcccctcaacacacaagaatatcaggttcctgagaccttcacacatcctgtttttacatagtgaacagttggcctggaatggtggggatggagccctggataggaggcaagaatttatttattttacttatgtattcattttgagacagcatctcactctgtcacccaggctggagtgcagtggcaccatcttggctcacttcaacctccgcctcccaggttcaagtgattcttgcgcctcagcctcccaggcagctggggctacaggcaccagccaccacacgcagccagtttttttttatttttagtagagatgggatttcaccatgttggccaggatgatctcaaactcctggcctcaagtgatccacccacctcggcctcccaaagtgctgggattacagacgtgagccactgcacctggccaggaggcaagaatttagtattcagatcttgattctgcgctgaaccacttggatggtaggctttagtctcctcacttcatgattgatgggatttgatgaacaatgtgctgaatgtttattctctcaagattataaaacaagtatcttaagcttccttaccccagagcacaggatcttcaaagacttagaacatcttttggtatttcaaatacaatagtaactttctgtttgacaaacgtctttgggttattatcttgattatttttttttattatactttaagttttagggtacatgtgcacaacatgcaggttatttatcatttttgtacaatcaaaatttgtttcctaattcacaatcatttttatgcccagctgagtcttccaaaagaaaacacctaactaaaaatagaaaacttctaggccttaatcgcaggccccataaggagaaagtattccagtgctgacataaaaagttcagggccaggaactcacatattagctgggctgacgtggcctgctgagtagcataattattgtcctaaattgtagtataagttgcttttagggtaagtggcttgggtatgtatataaagcaataagaattttgctcctggaaaatggtaaacaactcatttcatgtcaaggccacagaacttaatgcacacttttgagagaaattataagagtcatggggaaatgcaacaataataccaaataacagacacaaaacttcactggcttacaataataaacatttatttagttcataagattgtggggttcagctgatcttggctgagtgtggcggagcttagctggacttgttcatacatctgtggttcattatgggtcaggcaggtagctctgtagctctgctgatcttgactgacttacatctctgggtatcagttggatgttgatgaatctaggataatttggggtatgggactgggatgactgaggtgactcaactcttttccttgtgttaaatcttctactagagtagtctaagcatgttcccgtgacatgccataggaataggagtgaaagctaagtaagggcttttttaagcctctgcataggccatgcctgctaacatcctattaaccaatgtcatcgcatgaccacatcatcttcaaggaatggagaaatagactcctcatctctcataagagaagctgagaatcataaagcaaaggctctgggtacagggaggagccattaatccagtcaatctaccacagaggagagaattgacgaggtcctggtcctggttttgctactagccagccatatccttgagaaagaccctaacttctctgggccacagattttcactaaataaaagaaaggatttgagtataattgctaaagtcattttctgagacgtcaaagtcatgaagggtttgactatgtaattgttaaatgttcttttttcaggttcctacagtaatctctagacacctgtgagatgattagaaattttgaaatatatttcaggactcagaggaggtataaaagcatggactatgttaggagttttcctctgtggcggtttcatggaatatatgcatatatagaggagttcacacctaagaactatgtcagaatgcatttggcttttgacttgaaataaagtttaaaaaggaaatgcatgttaggaactgtgcttggtaaatcacatggtctctagtttctgtctttcctcttttattgattcagtatttggatctacttagtattttgcctacctcgtccttgactcctccaaccttcctttctggcaacttagcaaccctcattctgcccttcacccaacagccttatcaacactttgaatctaaatctgagcattagcattccagaagtctgaagatatgagatctacaaaagaatggtttaatatttatctagaccctgaagtaatgttgttgaggaaggaagagaatgcacaaaaggagaaaattgttggaagacctttgtctaaagtggtgctattcacagtgtggttcttagaccagcagcaacagcatcaccttggagcttgttagaaatgcagggtagcatgccccaccccagatcttctgaatcagaatttgcatcttaacaaaatccccagagattttgtatgtacattaccttgtcacttttaatgtgcatccatctgtgaaattagccatagattatgaaaacagagtatgtgagaattgtaatccctctattgtaatctatggctaattcatgaaagtaaatgtgtgataatttaatttttatatattagagcagattcaaagttgagattcatgttttctatcacatctacatacttacatatatacctgtagattgtgtagggaagagggaatttacagctacagagctgtgtctccccagtgaatgtcatctattgtatgtccaatggaggaagtgttgagagcttctgcccaaaataaggataatactaaaggtattggcagattctacaaggctcaatttttaagtctcatgtccttcataaagtatttcccatattaccttaaggctacaatacagtcttcattttcagcatccacagtccatcttgtgtgtggcactcattcagtccaatgttttattttccccgtatccattgcttgtcacctaggacggattctaatttctccagtcaccacaacaccaaacagggccttgcatgggtcagagtgttcaaaataccatttattgacaaatgcatcaaaatcaacaaaaaaccagaatatagtcccaaaagagaaatccaccaagtaccataactgaccaaataatgactcaaattaactggaaagaacaaggactggttcataggcaggactttagattttttttgctgtaagtgattttttctctctttttaaaaatgaggttacacaatattaattaataagcaaatcagagtatgctaagcatttaatatgtatgatcttgtttaaaccttttaacagcccaggaaaattggttttattattcctatgttatacatgagacagttaaaattccaagagattaaataagctgagcaaggtcatatttcataaaatgcaagcattctaaaccctatgtggagaaagaatcttatctatcccaaagtgaattgtctactttgtgtagatctatggcatcagtttaacttatgttgccttcttagccctgtgtaacaggttctattgctagttggtatttgttcacaagataaaaattaattttaatattattttgaagcaaatataattatttaggaaaatctacccaaaatataggcatgcatcaaactccagcacccaataaaaagcagcagtaattgatttccattgtgaatggcctgtattcttctacattggcatggactatccagtttacttctgtttacatctggagtattttcaactttgacctagaaatacactgatcaccatttcactcctcatctttagatttcagttgccaatggcaaccttgaattacaaagttgaacaaaagctgcattttacttgagtggtttgtaattttgaacttgagttcatgttttctaggagttgtttgtctataggtgtcagtcctgcccttggttgccgaggaacccgaacattctgaatttgctatgcctctgctgggactcagtgggctttatcagtttctgaacagtttttgctttaaattattgggactgggtactcaattcacaggggtaatatgaatttggaaactgcactcattcatgggtttctaattccctttgtggatgtttttcctcaatgtgctccatgaatcatttgcttccttgcctcatctccaaggttgtggattgggttttcctagttcccatttgaagggtgggcacccctggctctattcagggacttcaggttcagcactccaacacccggcatcctgaggcctcctcttccaatctctcctcgccccgcaaaatggagaatcaattctgttaactgtgagttcctttgttatttctgcgacttaaggatttcttttccttatattcaaactcagctgtaaacttaagtgaatatgtatgtactgtttcattttgcctttccctatgtttggaatagaaaaggaaattttcagtcagccatattgactcaaagtcccatggcaatttattctaaggaaacttagtggaaaacaaataaacaaacaaaaactgaaatggttaggatatagcatgtggtcactttccaacaatccttgggtaacatgactaacctcagtctataaatttcttatgatcctgttatttttattcttgaagcaaaattcatgagattattctaaaaataagatgaggccttgcacgtttgctcaggcttaattttgaaaccattcattctatgaatgtatgattttaatgcatttcccattgcttttaatatccacttagctaactgatgatgttgaggttaaaatactatagtccttgcagtaattctcgtaaaattgtcctagtcactgtatcccacattcagagttctacatttttcttttttgtattttatagaaattatattagattttgttttcattttagaatgctatttttatgctaaaaatgaaataatcacattaccataaaagtgagaaatagaataaataaagatactcataattctaacacagtttatattttagtgtttcttttcaaagtcgttttgtattctttaaaaaaatggtcatagttattatcacagtatgtatacaactataggtacattttttcacttatcacaaaaatataattatttctccctgttttcaaagccattggtttatattatttgactacctcatagttctttaagtgagagccttatgatttttttacagaaacacttacgttttattcatgtttttgctgtttcttggcttttttgttagttttactattttccctgatctttagcagtaaattccaaaatattctgagcaagataattagagtaccatattattattgctgcctctcaaaggctaggagatatatttttaaagtgttaaaagactataaggaattaaattttaaatatatgcagcatgtattttacatctcagaattgctaagcgattaaatttcaaatgttctcaccacaaaaaatggtaagtatttgaggtgataaatatgttaattggctttatttaattactccatgttgtatttataaatcatggcatcattctgtactacataaatacatacaattttaaattgtcaattttatttatatatatgtgtatgtacacacacacacacacacacacacacacacgcacaacagatgctcccagagaagaaaaagaataaaataattgaaaatgtctactgagaaaacaaactgaaacaagtgatcctatgtctatatttaaggtaacataaccatacaaagaatataattactttcagtgaattttggcagagtaatataattgtgcatccttagtaggatatatttgatgaataaaaagaacttcaaaaaagtctcaagcttcatttgcttattttattgacaggtcataatattgaaactatttctggatatattaatataaagcaaataaataaatatgctaatgctatctgaaagcaacctttttaggaaacgtatgcttcagtctttatgggtgaaatgtcatgatgcctgaaacattttcaaatgactcagcaaaaaatatagagatagacaatacataatgcatatgtggcaaaacattgaaattaaggtagttttcacaggctggttttgttttgttttattttttggttgctttgcctgtacaaacaatgctaaatcaatgctatttttcctgtacaaaaataaatatcttagtgtattcattcttatatgttggtggttttgtttctgtgggccaaattcccaaaaatggagttgctgggttacaagcctatgtttgccttcttataaattttgtcaaattattgcccaatgtttcaaagtgtcaatttctcagaatgttattgcttctttaaaggaaatttcttttaaatttaatgaattaaattaaattaatcaatataataaatgtcccttgaaaaggtattgtgctattgcatttctctaattgttaatgagctgctttcatctatatttcaaatatatatagttgtattgtatatatattctttgtattttatttcttttcctatgaattgctttatttatgctcatttttcagagaaatggattattttcatctagataaagatatctatatttttctttcttatgtttttctgtcttgcttaaaaaggtctctgtaccccatgattatacagttattcacaatcacaattatacttttggcacattctcctagacagaagcaaataacaagcaaataacaatcctaagattgttattggcttcatattttatattacaaagtggtatatatactatacgtagtatatataatatacataatataaatattaatatatgtaatacattatattaatttattatgtttatattataaaatatttatataacatataaaatatttttatatataaatataatatattaatatttatattataaaatacattggccttatattttatattaagatctttcatacacttcattgggcaaaatgacctgagttggactctggaattccaaattttgaaaaccttgcaaatatctgtctgcacattatccagctgcatatttttttttaagttttctcaattcttctttgttattccattgtggcttattgttctctggtttcaatttgtttccttaggaaattggtttgattgtctctgattcataactcagtaatctgtcttatatttatgccacatttatgttatactgggttttgtttgtttgttttctgattgtaagctaaccttcaagagtaactttgcttgctccttggccttcacttattttttttatctaaaagctttccttaactatatcaaatctctgccttttttaaagacagaagaaaagaatgtcagagtcagaaaagcatcccaagtacaaaaatctttgacaacacaggaagaattgaatacatttgaacttgaccgtattgccttttcctgcttaactacccagagttcacaaaaatgactagtgggcaatgtcttttgaaaatcaagttaactgagaaatttagaatttgagcctgactagtcaaattaaagaactgggcctataataaaacaaactctgacaacactcttctttattaatatctgagtataataataacaactcatcttaaatttagaggttaaattcaatcatgttctttcgtctttcttgttcattttccaaaaagaggtcttatgaacttaagattaaacaaactcaagtttgacaatgttatgctagaaaggctccaaggcatagcctacaaaatcacatttgtcttgaaaatctatctgtcctgtggtgattttttttccaagaatatgctttgaggccacagcaatgaaaggatggggccagctgtgttagcttatgagtattttatgggtccaggccacataatgagactactttctgttcccctcactcaaagttatagccataatactgctgcctaacaaccaaccataaaaatcagtcacaaaacaagcatttgctaagttgatgagtctatgaactggttctggtctggaccaggctcacctgatctcagtaggcttgttcatgcctgtgtttagctggtggtcagctaggggtgagctggtttagaatagcttcacttttatatctgatagtcaattgaagtgatgcaaaaagtataataactgggccatgtgtctcctcttctggcaagctaggctgagcttgttcacatgatggctgagtaaacttctaactgtgagagcagaagcacacaaggccttgtgacgtctggactcagaacagcatatacttttgacacattctcctagacagaaccaaataacaaggcctccccagattcaagaagatgagaaatacactccgttctttgctgggatgggatgagctgcaaagtcacaccacaaaggttatgattacaaggaggggtgaagaattactgccatttgcacgaccaatctaccattcccacctaacaccttgtttcacttgcacagaatagaaattcaacacatattagagtacaaaacccagaatatggcaattagatagtatgatgctgaacctcagaacagaggcaatcaaaaggaagccctggtgatctgtggaggaccatctaagcctaggattatggggaaggaaaattaggaagaatctaaactggaattccacagttggacctaacttcgggagtcccctggttaaagccagatttaaatctgttaggggaaaggttataaattctccatgagcccagtggggctgatgaatgtgatttgaattgattgccaacaataaaaactcaggctcttacatgaagatgtggatttctgacttcaatatttaatctgacaagcatcagctagaactgagttgtttgtactccctttagacagggcctgtcatctctagctcttcagaaaccccacaaccccctctttcttgcacatagcctgctacttatttacatgacttgcctggcccctgtaacatctgagtttgcaacccttgggctggaatagctctagaccactgatggatggggctttgttggaacggagccagaattaccctgtattcttttcatattttcttacaatgaacaagtatttagtttataagaagaaaaagcaaaagctctaacttggaatgtaataaatacaattttgaaattagttcattaataattgtatggctgtttaaaaagagtgaaatatatggcacttaatatgtcatgaagcagtgacttagtttagaatataataaaatctactactatcccatgatgaaagtctactacagttataacttagccacaactgggtcaattattataaattattaaaaatcatcatcaaaattaaattactaaaatgtaggtttttcttagaattaaattatttaaaatgttaaaaagcattggtttaggtatttgacattttcttgtattttacttcttttgttaataattaaagaaatagtacttatcaagcactatggggtcttgtccaccaatgagcattaacctgagagaaattatctgctaggtcaggtacaatatatccatagctgaaggtcccccagttcaacctataagagaacaacaatctgttgttttcttaaaacaggctcacttgcttttcttccttccctatcttccttggaaacacatgtgttactgaattaaaattgaggtgaattgatgatgaggtctgaatggtagtaaatggacgctgtcaaacaacaggctaagatttcattcatgcaaaagagtacgacattgtaaaagccccacttccttctaaattgttggaacagcagggaaagaactggcaattgtcttcttcctgtttgatgccccagtgactcgtatgtgccaacatggagagtagggccctgtacaaggtgctccatcatagccacatgagtccagggccctgagcgccccctcacagcatgtttcctcctcggcttataagaatttatatgctagcaaatagattcataaataccccacattttatatgtagggagaatagttgactttcaatactcagcctaagccatttttaccagataccatttttatttttattttttcattttctatttttatttatttttatttttctttgatatttcaataatttttataaatttttaaaaatttcaacttttattttagattcagaaggtacatgtacaggtttgttacatgagtatattgtgtaacatatatgtatgagtatattgtgctgaggtttgggatacgaatgatcctgtcacaaaaataataaacatagtacccagcaattagtttttcaaggcttgcccccgactccctcccccactttattagtccccagtgtcaatcattgccatatttatgtccatgaatacccaatgtttagctcccacttataagtgagactgtgtggtatttggttttctgttcctacattaatttgcttaggataatggcctccagctgcatccatgttgctgcaaaggacatgatttcatactttttatggctgcctactattccacattataagtaccatattttctttatccagtccaccattaatgggcacctaggttgattgaatgtctttgctattgtgaatagtgctatgataaacatacaagtgcatgtcacacactttttgatgtgaaaaaaaaaaaaaaacaagtcatttaaactagatccataatctgttatctgagattcttggggcctgttgtttttcagaattttaacttttctgattttagaaaggcaatgtgatgcatataccatgagcataacactccaggcagacctgagtaatcctcaaaatcaaacaaattaatatgtctgcagttaagttcatgtatagtcatatgacagggcatacatgaaattatacatatttcatgtatcagtatcatcccaatatcagttcatgtcaatgagtctgccacaaatttgccagaaaaagaaaaagaaaaagaaaaaaaggaaacttcttctggatttcagaactttgggatagataagggattacttaatataaattaaataatttagtaatggcaaaatttatctgtcacagaagtgagagtgaaaggagttgaactaaaggggatgctcccaagctgctgacactgtctagaaggaggctaagactcaggaagacagatgtcctggagattgacttcaccctggcattccagggatcagaacaagccccagaggctgccctgaaagctgcagatggaggatgcacagccaggatcaagacaaaaagtagaactgggggctgagagtagaacccagacagggagctatcagagtggccaaagcagattaaccaccttggcatcccccaagagctattgagaaacgcaggagctcaggccccactcaggcctcctgagtcggacagaatcaagatcaaattccagacgatttgtgtgcacttaaagtttgaaaagcagggggaaaaatacaggttttaagtccatgtcttaaaaattgcctccaagctaataaggaggtgtgggggaagcatttaaccttgcatggtgtttcaaggattattctccctgctcaccaattgataagcagagataattttctttaaaattcaaggttttctcttggactcagcacagcacagctccctaccagacaactctccctgttgcccccgttctctccctgtctaccggagaatcccagcttttatattattttatgactaagacatccacgtaagtctccatttgaagaaaggcttccaggactttaaaacatctgaaaattctccagggcataaaatagacacattaagagacagtttaaagggtagctaaaatagtttacaaggcaaataaaaattagaatgaaaaatgaatcaaaataaagtggtggcaaaataagtcaaaataaaagttcaagttggttacacgagtttgtttactttgtgaaaatgtatcaagctgctccttagaccccagcattggcttccaggcctctgactaaagctgcacatctcaaagtccactccacactgctctgtctattctactcagcttcttagcttcccccagccaggttcatggctgaccttggaacgctcacctatcaatatttctcaacccctaaatgtaagaacctcagatcattttatattatttctgacacatttttctatttttctttctttcttttcctctttttctttctttctttcttttttttttttttttttggttttgagatggagtctcactctgtcgcccagactggagtgcactggcgcgatctcagctcaccacaaccactgcctcctgggttcaagcgattctcctgccccagcctcccaagtaggtgggatcacaggtgcacgctaccatacctagctaatttttgtattttagtagggatggagtttcaccatgttggctaggctggtcttaaactcctgacctcaagcaatccacctgcttcaacctcccaaagtgctgggatcacagccgcacgccactatacccagctcatttttgtattttagtagagatggagtttcaccccatgctggtcttaaactcctgacctcaagcaatcgcaatcaacctgcctcaacctcaacctcccaaagtgctgggattacacgtgtgagccaccacgcccagactctgacacctttttcaaaagacccgtgtgtgtgtgtgtgtgtgtgtgtgtgtgtgcatttgtagataccgctattcatcttattctgagtctttagccttattgtgccacacataacttgaagttgactttcagctacagacaaatgatgtgtccaactaaactttgttacatctcctctataggtgaccagtgaatgatattttaagttaatgtattcatcagccccttttgtatatctctttcagagagtttctatgggagtgggtatagaaacataaacaacttcaagtcatctcccctcttgatgtctctcagctgcaggtggagctggagcaagaataccaagacaaattcaaaagactgcccctcgagattttggaattcgtgcaggaagccatgaaaggaaagatcagtgaagacagcaatcacggttctgcccctctctccctgtcctcagaccctggaaaagtgaaccacaagactccctccagtgaggagctgggaggagacatcccaggaaaagaatttgatactcctctgtgaatgctcctgccaggccttcagaaattgcatggccactccagcgtcatcggactctctcttattacaaagatcactgcccaggaccatcttcccgagaagcatcccttagcctaaaatccacaccaaagggagagttccagaggaatccatgaagaattcccatgcccaggctccatgtgtcatgtggaaacctccacaggtctgctagtgaagaatgcatgtatgtgagatttttgttttctttccaatagcaaattcaaagcaagcaacttgcaggctccatggaacttttaatgaaggacagtgtcttctttgaagaaaatcaagctcgtgtttttattcgaagctctggtgtaaaatatttcaaagtcatagaaatagtttgagaaatgcatagcattatttaacactattgaacagccgactttgagcattgtttcttctaactgcccctcaactaccattatcttcaagtcaacatgcatattacattttcatcctttgctttgcaagcactggtggcttgcagtttgctaatttatttatcatagagtcatcaatgtatttgttgctgacatggttttattagatactgtagtgattcaaataagttttctatttgaaaaaaaaaatcacttgattgtatccttgcccagtgaagccatcctaagacttagcaatatggattgtacatttggctgcatgagcaagtcggccgcacacttccagacagtgtgctgtttgaattgactatttgcactcaaagtctgggtattcattggttattggcctgaaatgatcaaataactacaaatgatctgttgaataaaaatagttgagctgatatatgttaagcagatattcaatcagaatgaacaggttccggtggttattttgccgtttgacattttttatggttcatttatttttaatatagagaggaagattgaatatttatctagagaatacaaagacccacatgtaaatgataggtattatctccatgtatatatgtacccacttagtcatgtaagtgcatatacacatacacacacatgagtgtagacatgtgtttattaattgacaatgacccaaatctcttccacaagacttaaaaccaaattcagggacaaatggatagagaagaaaagggtcaaacatcgagattacatggatgttaaattatatggagacgctaagaaataattgatggagccattgatgcaaaccgaagtagatttagaacttatatgaatttgatttatattttgcaagatcaaaaattagatgttaagtatcagattttaagcttgttttaatggtcaaaaaattaggacagaaataatatggacatttattagtatcttccataatttttaagtctgacacatttctattttattctaacataaaaaaacttccattatatatttactaagtatatttaattcacttaactctgtctttataagttcctattttagatggaataagagaaacaaattatatcaaggtaaaactgatcaaaagcataattgaaagttctgaaaaaagaaaaataataatatgtagaaaaatgtaacttagagagtaacacatgaacattgaagttaaaacccagaagccagatgctcacagttttattttactttaaaataaacctgtctgactgtagctttgtgaaatatcttaaaacgcaaaaaccaattgtgtcctgaaaattgtttcaagaatttaatatttttatgaaaattattttatttaactttaagcaataactagagattacaattaaattttaatcaaaatgaaggcttagttcaaacataaggaaacagtgtttgattaaaaaaaacacatctagtaagacgtaaggggaaaatcacatcctctttggagatgattatattttgatctgaagggtttggggtgttcattagacacttaataaaacttaacttccaatgaaaaagaaatcttttgtaaatcattctacttttgcactttgaaagaaaggcgttaatcataaagaagcaagaatggtcaaaatcgaatgctgcatttttataaacaaaattacagactgtctgaaattgaagaagaatgaactaataatagcattcataaccaaacacaatgatgattattgcagaacattgtatcacattttagtccagagatagaataaagttgaataaccttgacttacacaaaactgttttggtagttggatttcattatcttagtgaatttagtcattttacaatatgtttgtatttggccatttactgtaatcacatttttatatctgtacaatgacactttttgcagttgtggggtagtgtgtaacactgtccatcttgcatcattgaaactactacaatgatactatcatttaataatattaatattacttgaaatagactaagataaagaaaaggggtctgtatgatgtgcagttttgtgcctttatgtatttgccttgttctttgtcgaatgtgtgaaattccgtactgtggtttttcctataatagaaagtagagctgtgtattaaattagactgtgtctctctgatacctttacactactgagaatagcatggttttggccatgtaaaccaattttcaaagttctaatgacatagccatgtgtttttggttttttatatttcattttaaaatttgagtatcaccatacattaattaatactcctgtagtagataagctgtcattaagtaattcccaaaaaaagggccatttgcttgcattactttgaatttaatgttgcgcttgtgcactgtgttaatattgtttgtgatggattggacgttgtgactcttgccttttaagaagaaaaaaaagataggacaaagtatttgaagctcttaaaatgtacatattttggttcttctatctcaaattatttaaaatgcataattcacatttttgtaataattctatgcaattttgtggcatgatgtttcttccacttgtaattttatgtgctttcatcacaaatccaaaggaaagaataaaaatttcttaacacaacccagcggttatttcttggggtcagagtcaaccttcttttgacagggaaagtggtgggagcgggcataatgccagtctttagggccatcatgcctaccctgacagggcacatccatgcctgtaaaggatattgggatgctgcaatgtgtgtgccagaggacacagttgtccttgctatcattccaccaccctccatccaggagtggaattacacttgccattgtttgcgtaatggagaccctctcttcctttctctcttccttcctttctccctgtcttccttgaccaaagttaagcaaggcaaaacagtcaaaagttttttgacataagttgcagtgacaagaactgacagagcacttgatgtaaattttcttataaaacagattttaaaagtgtttacaatattgataggataagaaatgtatgtgtgagttttatgtaaatgttccagaggcaccccaaatgcaatgtattaggtacttatttctgtgttacaaatggctctaaaatctaggggcttaaaacaatcagaattatctcttatctcttagcttctcaaaaaaaaatgtgtgggtacctagtaggtatatatatttatagggtacatgagagagagatgttgatacaggcataaaatgtgtaataattacattagggtaaatggggtatccatcacctcaagcatttatcctttccttgtgttagaaacaatccaattatactcttctaattatttttaaatgcacaataagttaattgactgtactcaccctgttgtgctatcaaacactagatcttattcattctgtctaactacatttttgctcgtattaatcatcctcactccctcttttccccaactaccctccccagcctctggtaaccatccttccactctctatcttcatgagttcagctattttaatttttatatcttaagaataagtaggacatgtgacgttcgtctttctgtgcctggcttatttcacttaccgtaatgacctctggttccatctacgttgttgcgaatgacaggatctcatttttaatggctgaatcgtactccattgtatatatgttatcatgtttcctttatccagtcatctgttgatggacacttagattactttcaaatcttggctatgataaacagtgctgcaacaaacatggtagtgcagatatctcttcaatgtactaatttcttttcttttgtatatgcctagaaatgggattgctggatcatatggtagctctacttttagtttcccaatgaatctccaaagtgttctccatagtgcttgcactaatttacattcccaccaatagtttacaaggcttcccttttctcctcattctcatcagcatttatttttctctgtcttttggataaaagccattttaactgggataagatgatatctcattgtagttgtttgatttgcatttctctgataatcaatgaggtagagtatacccgtttgccatttgtatgtcatcttttgaaaaaatgtctattcagatcttttgctcatttttaaattggatggatttcttttctaaagaattgtttgagctacttatatattctgcttattaatcccttgggagctgggaagtcttaaaatgttttctcccattctgtggattgtctcttcactttgttgattgtttccttttctgtgtagaagatttttaatctgtgtgatcccacttgtctattttccccccagttgcctgcacttgtggggtattccttaagaaatctttgtccacttcaatgtcctggagagtttccccaatattttatcttagtagtttcatagtttcaggtcttagatttaagtctttagtccattttgatttgatgtttgtatatggtgagagatagaggtcaagttttattgttctgtatatggatatacagttttcccagcaccatttattgaagagactgtcctttctccaacatatgtccttggcacctttgttcaaaatgagctcactgtagatgtagtgatttatttctgggttctctactctgttccattggtcaatgtgtctgtttctatgccagcaccatgctgtttgggttactatagctctgtagtataatttgaagtcaaataatgtggcctccccagttttgttctttttgctcatgacagctttggctattctgggccttttgtggttccacataaattttaggattttttttttctatttctgtgaagaatgtcattggtattttgatagggattgcactgaatctgtagattgctttgggtgatatggacattttaacagtattgattcttccaatccatgaacatgcaatatcgttcctttttcttgtgtcctcttcaatttcttgcatcaatgttttgtagtttttatggtacagatctttcagttctttggtttaaatttattcctaagtattttacttgtagctattataaatgggattatcttctcgatatcttcttcagattgttcactgctggtatatagaaatgctattattttttgtatgttaactttatatcctgcaactttactgaatttatttctcagttctaataatttttggtggagtcttagctttttacaaatataagattatatcatctgcaaacaaggataatttgatttttcctttccaatttggatgccatttatttccttctcttgtctgattgttctagctaagacttaaagtactgtgttcaacaacagcggtgaaagtgggcatccttctcttgttccagatcttagaggaatgacttaccatttttttcaattcagtgtgatactagctatagatttgtcatatatggcttttccttctgtgtccagttttgttagggcttttatcacaaagtgatgctgaattttatcaaatgttatctcacaggttttttgagtcaggaattcagagagggcaaagcagatatggcttgtctctatgatatctggggcctcagccagaagattagaggtctagggctagaatccactcacacatctagtggttgatgttgtatcaagtgggagcctagctggggctctggggtggaatacttgctcatgccctttctatggagaagcctgggcctgggctttttcacaatatggtagctggattccaaggaagagcctcctgagagagccagacagaaaccatcaacatttttataaccaagcctcaaagttacatacatcacttatgccagactctattcattggtgctatcacaagcctcttcccagattcaaggtgcagtaacaaacatagaccccatcttaccttgggaacacagttgatcatcctgaagaagtacatgagggatggaatgaatatataggcatgaccatctttaaaaaatataatctgccacacacagtatgcatgaagccgaatttgtgttaccttcaaagctgctccacctcctttgctttctacatcagtgaacaaaaccagtattacaaatcacactccagcctacacaaccttatggaccattccacctcataggctttttaactaccatttctttcaactgcttcatccatcctttctctttctcttaaatcactcccccagtacacgcacacagacacacaagttcctttggttccctcctttccctggctaacttctatttatcgttcagtttataacataaatgtcaattcctctaggaaccattcttggatccaccaaagcttctgccaggccccttcatctattctcccaatgcaacctgtatcagtcacccactgctgcataacaagccacagcaaaacttgatgtttgaaataactaccacttactattggttgtgggcctatggatgggtagatggctctgctgatctgagctgggctgggcttatctcagctgggctcatctatgccgctacggtaagctgagagctatctggtggctgatcatggctaggctcattgacatgtctggggccttggctggaacaaccgggctgatgtgactctaattcataggatttctcatcctctgggagataaaatgggtatccaataaaatattctccaactattaaaaagagttaaatactgatacatgctaaaacacagacaaatctttaaaactttatgctaagtgaaagaagccagatggaaaaggtcacatattgtataaatccagttgtatgaaatgtatggctttttcacatgtcagaggcaggatataaagaacacataaaagtgctcaaggtctcttgaagtctaaactcagaaccatgcaccatcacttccaccacattctattggtgaaaataagccaaaaggccagcccagataaagaataaaaggagcctccaatgtcacaaggaaaaagatgtagacacagggttgttactaaggtaatcaatccagcaatgccttgttatttcttccacatagagagtgcatgccaactccatgtaatggccttcttactaaatacatcctccatggacacctttgatgtcagatgtcatgtctcatttacgatgaatctgcacactcaccctaatgtcataacttaataaatattgcatttacagtgaataaatccatttgcttatctagctattagtgctacattagaggaaaataaacaattggctaggtacaaaggctcatgcctgtaatcctaacactttgggaggcagaggtggttggattgcttgagctcaagagttcaagaccagcttgggaagcatggtgagacccaatatcatttttcctattttaaatataatttttttccctttcctaaaatagaaaaaattagctgggcatggtggcatgcacctctagtcccagctacttgggaagctgaagttaagaaaatcacttgagcccagaaattcaatgctgcagtgagccatgattgtaccattgcactctaacctgggagacttagagcaataccctgtctcaaaaacaaacaaacaacaacaacaaaaacaaacaaacacaaagcaagaccagaaaaagaaacaactgatatctcaattatctcaataataaatgtcattaagtcaatgctacaatgctatttaggtactttctgagtcagcaacactataatagtaaggctagactacacaggagccacactctttgcctttgacttagggtaccaactccaaaacatgaaagagctagtaactgatgaaaccaaatattattttctgagacattggtgaagaaagtggggcttaccttagatcctggggttaccaagcagactctttttgcccataagagaaaattcaggagcaattcttgcccctgaacattcatgtattgttaaattgcttctttgaacactctggatattgtatctgtttgtttgttttatgtttctctctgattctggatcttttattctttttaatattgtatttaatttttttagaggcacggtctctaaaaaaggcatagtctcactctgtcacccagtctggagtgcagtggtgcattcatagctcactgaagtttcaaactcctgggcccaagcaaccctcccacatcagcctcctaagtagcggggactgcaggtgtgcacaatctagctaattttttaaataacaactttataattcatgttccataaagtacactgttttacaaagtacacactccagtgatttttagtgtaatcacagtttcttattaatcatcaccctaatttcagaacattttcatcaccccaaaaagaaacctcatacccataagaaaacacttctcattccctcccccaaacattctctcttcagcccgtgaaaaccattaattctttttctgtctctgtggatttgcctattctggacatttcatacaattgaatttatacattatgtgaccttttccatctggcttctttcacttagcataaagttttcaagattcatctatcagtatttaactctttttaatagttggagaatattttatcggaaatatattttatttattcattcacacctgatggacatttgggttgcttccattttttggttattatgaataatgctgctatgaacatttgcatacaagtctttatgtggaaatatgttttcagcttctcttgggtatatacttaggagtagaattgctatgttatatggtaactctatgcttaaccctttgaggaactgccaaactgttttccaaagtggctgtaccgctttaaatacccaacaatgtatgaagcttccaatctctcacattcttgctcacacttgttttctgtctttttgattattaatatcctagtgggtgtggaataatgtctcactgtggttttcatttgcatttctctagtaactaatatgttgtgtatcttgaccatatgcatatcttcagtggaatgtctgttcaaatcctttgcccatttttaattggttgaatatttgtttttaaatctaggtctcctttcttgatttttggcctctggtgattttgtggctgtccatcacaaaacctcatcttaggaaggctctttcaattattatttctccgaggctactgaacagctgtaggttgcatagaaatagtcctggttgttttctatgtgactccagaaagccatttgtctgcttattgttttactaaatgtcaaatatttgtttatttccccagacttctctttcttctaaaattagagtacataaaatgtctgataaatgtgagttgcattaacttgcatccagtaaatttcttacagaagaaaatgtatttattaagggcaagtgaaagtttgaatattgcaatggcgatcttagccccacacactttaaaagttgaagcaaattacataacacattatccaactgatgctgtcaagaaattcaatgtgtcaataagaaacacaccaataacaaaggaaaacaaattaccaattaaattatgactcctcatcaaacataaaggcattcaatacaatttcaggaaggttaaaagcaaaagtatatcttagaatcagtgaaatatcataatttggtttcttttttttacttccaaaactacctgttctataagaacctatggttgtacgttaatttatttaaaaccaatagaaagcacaatctccaggcaggattgtattcaaagtaaaaataccccaagaccagaaaaatagctggaaagcagagataagtttgtactaaacttgctacaaaaagtgcccaagtaagatttgattcataatctaccagagtctcttaacattgctttcatcccctctttgtctctctcgtgattgtcactgataaagaaactgccaccaaaaccacccttaaaacccagcttgtacagctcttgccttttctcccctcaccctcatctctgtatttactctattttcttgaaccatctttaatctttgcatgaatcctttaagctttccaatgtgaatcactgtattctttctgaatgctctagtgttgcttcattcagccccccaaaggctcacaaataaagcaggcaaaaatagaattatctttacactgggagaggctacagctacaccttcgttaacatattttccagtaatatactcaatcaacacatatttaataaacacctactatattctaggcattgattctgccataggctcagtcagatttaaagtgcatgtttcttggtaataatcattctcaggtaagtatatctttaagtccactctctgtgcctctactcagactctgtgtctctaccccaacacagtttgacagaaggaagggtctatttctcttttctcacagctaggctaatgctatgcaagtatgcactcttgcacgctcacacacacacacatacaaaccccagattgtggcagagggtcttcagcatcgaatggtatttaccatctttttatcctcacttgcaatttacacgcagcaaacggccaccccaagttttggaacctaggatatagcccaagagacagtttatgagttcaagtagtttatttgggagatgaatttgtaccgaaatctctattaaaaatgccaaactaggattgattcacaacacattacaaagtctctactttccccatcttttcatctccctgtttattacagtcacagattaaagacctgcccctaacatttccctcaattcccagttgatttattccattttctttctttcttctattttctttaagtgaggtgggagtgtgaggaaagttattttgatgactgggttatcactgtgaacaaaagtgctcaagccccccagtcaaactcaaaaggccttaggtgcacccctcacagttaactcaccaagacatgaagaagctgggacatttacccaccatttcccatcactcattagttgaggctttctgctcaggcactagctccttaacacttccaacttgtgcaatttattagccaagcatgctcctgtggcaagaaagcatcctcaggcagaaataaaaaactctttaggtgaagagagatttttctcaggtgatctctgaagaaggctaagggctacatcctaacacccaacatgtcaagaaaggttgcattccatctgtaagtaacatacacggaagagttaggtaaactggtttccataaagctacctatgcactaggaattatagatctttaattgttaaacctcaaggcacccccttgcccaactctgagacttatatgtgaccataattatagcttgactcatcctcaaatggaaggacccagggaataagcctatgccagccctagaattgggcttggaaacatttgagccaggaattctagggtgctggttatagtctaaaaagggtatgttgcctccagtttggcattaggccaaacagatttctccttgtggggtagacacaaccaggcaaaggccagagttaagacctctaaagcatgaggcccaaggcaagcacttctcttgcctggatccaggacagtattgcttccaaacataagcagctggataatatcaaaaatattaaataatataatattgtccctatctgatatggcttggatgtttgtcctgtccaaatctcatgttgcacatgttgaaatgtgattctcaatgttggaggtggggcctagtgggaggtcattgaatcatgggagtagatccctcatgaatggtttagcaccatccctttggtgataagtgagttcttgctcagttagtgcacatgagacctggctgttgaaacatccgagacctcatttctctctctgtctcttgctcccactctgaacgtgtgacatgctggctttccctttggcttccaccattagtaagagctccctgagcccctcaccagaaactgagcagatgccagcactatgcttcctgtacagcctgccaaactgtgagccaattaaacctcttttctttatcaattgctcagcctcaggtatttctttatagcagtgcaagaataaactaatacaccatatgatctttcatttactcaaaagtcaagcctttctgtgtttcatgtctcagagaataaaagcagtaaggtggaaagctgaaagtctgtgaatctcttcctggcatttctcattcaaaaacctgaataattggaagaatggaaaggattccagttatggacaaaatgttgaaagaaatcatgaaacaaaataatgtctgcctgatctgagaaaaataaacaaaataaacagacatggggggtgggtatgttaaaagtatagatgtcagaggttcttgagaaagaaatttagtctctttatgcaaaacaccaaagaaagaacgagatctcagagggaccacagtcaaccttagcaaattgtactaaggcagcttcaataaatccctatattctagtgtggcatggaaacaacagaaaaattccagaattcccaaggttgaaacagacaaagcagtgagaacgattgaatataaatggactaggaggacagcaacaacgtagagtggtggatgtctcagcagaggcctgcatagaaagacgacattgaggatcagtgggttctccttctggcacatcttagcgctgtgtaagcctcttggaatttagctacaactgaaaataagtgagtttctcttagcagatgggcactaaaaaaatgaactattgagttacataaaaacatcttaccaaaagcttctgaatcatgaagagagtcatttatacccaaaatgactgagcttatccgaaatgtcctttaagacctgaaggaatacacatgtatatgacacgaaagataaaaggttgttccactggccaactatgatgaagaaagagctcccttagagattcccatgttgaccactgatttttcttctcagtgcttgaaaccttgctgataatgttttcttaaatttccagatttgcccttcctcttcttctaagatttgggcacacctgaatatttaccttaatatgcttaatgccatacactgtcctttctattccaatggcccgttacggtagtctgtggtccagtatattgtattatcctacttattatgtgctggattctaattctgaggaaagaaagccattgtttatgctgtttatcttatttactgcctgcctaagcactgcataatgcaaagggagattagataaccacatgttagctattccagctgtccatggcctctcaaatcctctctgctttttgaaagttccttcttatgtcattcagcacatcaactttataatggcctctgagacagctaccattttcagttagcttcctagttcccaattttcctaacctatcttccaatttaatgattctcttttcagctgtgtctaatttgctgttaaatctgtctgttgagttgtttgctttttgtttcagctcttgcatatttttatttctagacattttttggcattcttttggaagtgctagatcactcttcatagttttctgttccctgaacattatttctacttgtctttttttcctttaagtatagtaagatgttttataaatgtcagcttcacaggttagtttctactggttcctgcttaaagtgctttattgtcttgtgtgtttaatttttactgaatagtacttattttccttgaaaaattatttatggccattctctaggatctaggatggaagtgccttctgagagaaagaattcatgtttgtttctacatggtgcctaggggagtagctaacctagatctcttcagtgtttgtttgtctatttttgatttggttttgttttttaatgtgtctaaaccactaatgtatacaatatctcattttaagaatacaatttctgatcttgccactgcactccagcctgggcaacaagggagactccgtctcaaaaaaaaaaaaaaaaaaagaatacaatttcttgtgaggccagttttgcagatacagcctttttgggaaaactttttccctagctgagaatcaaagaaactttctttgcaggccctatcataaagacagtgttaagattacttctaatttttctttatcctaattttgaatcctttgggacacctgcttaatggtcaaatggcctcttattagactttctgatttaaattaactcagactttcatttttatctgtcccatggggccatcaaaattgaagttcaaatttgccaggattggtaaacaatgccttcagtgctctacttacctctctggattctagatttcccttagagtttggcctgataattacatgctatcttgtatcttcattatttttaaaaggttttgttttctactttatctagtactttagttgttgtctcagaaaagttattgagttcctactggatatatttgaacatttttaactatttttctgaaaaatacattcagtgatacccagacctggccctgcatctggttaacatgaaatgtttactcttagtctcctgggaaagtagccaatcaaagtctaaaaatgaagtggctcatttgttgtttggggacactccatagcatcacactcatagcaactagatagaaaaatatcaggtagggatggcaaagccttcttctataatctaaagaccttcaagttgtcaaatgtatgtatgatatccttgtaagctaaatttagcacctagagctccagtttctgtctaagatgtgtaaaaactcatctagcctgacagttccctgttggctgcacctctgagaagtcaattattctcaacaatgccaattttaatttatccaccctaaattactcccaaatttctatgtgtatttttaatagaaggtataataccaaatttaagtgctaatggctttctggacagtgatataaaacctgacccttggtcatcaaattgcctgaggaaacagatgttttgattacattatatttttcactaagaaataagtataagatcaattattctttattttatctccagggcttatagtagggccaggcacaattaatgacaattaataaaggttgaataaattaattaacctgtggtagattggttgcaaaaaaaaaaaatggcactaattcttcacagacttcctgtatttttataatgtgactttgcagatcttgccatgaagaggccatgtctcttctctatccctgaatctgggctggtcttaagataggccttggctaagagagtgagttactctattattacaggtcccagattaggcgtctttttttttttttttttttttggaatcctgttaccaccatgagaacaggcctttgctagcctgttggaggaagagaaacctcataaagcagagttaacctcattttcccagctgaaggaccaaacataagatagagcccaaccaggatcagttcagccacctagccaagcagcagctgaccacccagctgagtgagcccagctaaggtagcagagctggttcaaagcagcggaactttctagccaatctgcaaacttgtaagcattaatgaatgatttttttgttttagccactaaattttggagtgcttcatttacagcagtaactaacttgcacaaaatcattgttacaaacccttctaggggtattttaaaagaaaggacaccaggttgggaatcagaagtcttcaattccatttcactctctgccatgagtttgttggtcttgcacaaaacaggccttctctgtgccttagatttgagattcctttgagttctaatcttatttttcatgtggaatcttccaaaatgttttactctgcattcctgccatccctcatgatacagtgagaaaagttgattttttttgtatacttgagaatgtattgagtctccaagggatttgcttgcatatcaagtattggaaattctagaaaattgagctgatgtatccttactctaagccttctctaaaagcatatttttagaataaatccttactgggagctttctgtgatttgtgttttcttttgtttttgttatgttattctcaaagcagaagtcaaacaaacaaactctattaaaataaatatccttgttaatcaaggctttagtgaactttgttccttttcatcatcccaaaaaggaacacaaaacagtgatttaataatggaacaaaaatatcactcagaaaaagaaagaatcctggctaacaccttgaaaccccgtctctactaaaaataaaaatattagccgggcgttgtggcgggtgcctgtagtcccagctactcaggaggctgaggcaggagaatggcgtgaacctgggaagcggagcttgcagtgagccgagatagcgccactgcactccagcctgggagaaagagcgagactccgtctcaaaaaaaaaagaaagaaagaaagaaagaaagcactccaatattcatctgatttttactaattgtttatattattggaatagagataattgtacttcatagccttcaattctgaaaagtataatggattcatatgtaatggactcaagcacacaaatttgtgtttatgcaaggggagcccatgtgacaatgattcttagtagtggagattagggatctcttagagattctgatgtaaactaagaaccttgattcagaaaatcacacaaatgtaaacattcacatagtagactttttcatgatttttgcctcctcagcactttataaacactgttctttttttttttttttttttgagatagagtctcactctgccatccaggctggagtacagtggcacaatcccacctcccaggttccagtgattctcctgcctcagcctcctgagtagctgggattacaggcatgcaccaccatgcccagctaatttttgtattttcagtagagatggggttttaccatgttagccaggctggtcttgaactcccgacctcaggtgatctgcccgcctcggcctcccaaagtgctgggattacaggcgtgagccaccacacctagcccaaacacttttcttatgtttgagaattttttccccttcttaatctgcatacctccggagtagaatctaaaaattcacttcccgtggttgcatctatgacacagacacatggtccataatcaactattcaggtagatatacacaggacatctatttgaaagcaaatgatattcaaacacatgcactcacagatccactctggctaggttggaggtgaagacattgagatttcagacacagtagtgcgtgggcagaggtactagtacattatagtgcatggcatctaagtgaggtgcagtgactgttcaggagtcggggcatcagagtattccctgaagcattgtgcagtgtaactttagagatgttcctagctgtccaactttcagcctaattcttagaccctttcagagattctgggagtcatctgatgcccttcaataaatgcttaaattatgtctgcaacagagaactctgaccaatatatgcatatcaaataaaaaaacagattttgcccttaatttcaagatttttacaagatcttctgaagatcatgcatggcttagctctcagaatacatagatgctcatttgttatattgtcagtggagaggtgatagggaatgatgctgcataaggcttcttggtacagaagaattaacactgaatagagtaagcagtcttggccctagtcttggctttgctactatttacctagtcattgcacagtaagtggtgtctatgtcccctgtcctgaatctgggcaggattgtgaccattagaataaggtagcagtggtgctgtgtgacttccaaggctaagtcaaacaaggcaacagatacaacttctgccttgtagcttgggacaccctgagccaccatacaagaagcctgattacccagaggcctctatgctgtgagcaagcccagaccatacagaacagccatgtgagttgccccagttgagaggctcagctgaggtgccagttgaaagccagtaacagctgccacatacaactctataacttctcatacagattgatacatgagcccaggacatcaggtattacccaggactgtcttgggaaaattgatgtacggccacccttttgagcatctactctgtgctaagcacttgtgccttcctttacctctgtgaactccttaaaatggggtgagggttgttgagctagtatatatcacaaatctcagtgccacaaggataaggcaagtaacaaaaacacatgagacagctgaatttgagtaacagaacatgtcaaggacgtcagtaaactgaaaggcacacacgaagtctagagggaacagatattcagctcccatatgtattatcagaaagcaatgcaggcacaattatctcctaatactctgattttttttttcaaaagaagttaaaaatatacatttttccatttaaatttaaaacgttctagacaatttttaaggtagtctttatgggttggaggatttcagtggactctccaggctaatagtccaaaataaatcaattaatgtaaataccccacaaccactcttaggtatctgctaatcctggctctccagcaggctcactttggggatagctgttatttttgttagaggggaaaccacttctataaaaagccactcttttgtctcagaattctagattgaaggtaattaaagctcccccccgcctttttttttatcttgtgtgaagaagttttaaactatcatgtttagttatataaatgtccacccaggtgcaggaaaaaaaataccaatcatgaactctgtgtattagtcagctattattgtaaaaatgttatgtagcaaatacccaaataacttacaacaagcattaatatcacagtcatagattttggggctggctaatctaggctgggctcagttggatggctctgccttacactgtgaggcagctaactatggcttacattcaggtcttctccctctgtgtttcttctgagattcagggagaaatagcagcatctatccagcagcaactctcctcacagcagatcaccagaatgcaagagctaagcctaattgaacaagttcagctaaggtctctgtttgcctcacatctgctaatatatcactgaccaaagttaagtcacaaagccaagcacaccctcaaagggcccagaaggacactccaccaacaatagaaaggggaaagaagtgaatgcttactgaaactaacccaaactctcatatcctacgtgtctttttgaaaagctgggttcttttctaaatcatccccgaacaacctctctctcaggcctcactggctccccatggagctgctggactctgggacgtcaccccaagtggattttggcctgctgtgagcgaaacacgtggtgggtggaagcaaatgccgaagacttggaactctcaggacaagtgctctaaattaggaacaaagcattccatgaactacgtcaaaactttaaaaataagcctttctccatgcacagctaatgaccttgctgaacacatttaaaaatgtctcatttaagatgtttaagtaattactcaggaggagtgaccataaggtttttccatcccatctgtgccctgcctctaagccctctctttcccttcattgccacgggtcctggttcccttgcaggctgttctcatgtaagacagcaacctaatgtaagaaatctacaaatcaatcgtgcctttgggtggcttctttgctaagaatattgttttatttactctgttcttttcatgccttctaaggagaaagaagacaactactgtcacagagagtatttctttaaggctgagccataggggaccagaggatagagaatacctacaatggtctctgatcacaaactcctttaaaatattattttttaaaagaaccatgaaacaaggtgaacatgctgcaaattcaagcctgagtaaataaaaaaccccacataacacctgatgttttgtaggagatgcaaaaaccagggtgcatagaaaacctagaagtatatattagtcggaagtagactgagatagtaggatagactgacccaggctctcaagtttcttatttactgtgtaactcaagataattgggctacctcatggtcaatcttggtacgtggttacattccgaagaaacacaagtgtctcatcaaacaaaccaaccaagaaatatgaaaatcttccatgaagactcaaagagatgtcaaagatagaggcaaattgtattgcataacacatcacactcctcttccctagcttcttgaagtcctacatctcacagcaacgatttaatcagatttattaatttcaattattcccatttgtttctccacaaatttttttttctttttttttttttaaaaaaaagacctggggccaagcataacggctaatgcctgtaaacccaacaatttgggaggccaaggcagaaggattgcttgaggccaggaatttgagactagcctgggcaacacagcaagaccttatctctaccaaaaataaaatacttagctgggcatgttggtgcatgactcctaggtacttaggaggctgagggaggatgatcacttgagaccaggaagtagaggccacagtgagctatgattgcaccactgcactttagcctgagcaacagaggaagacccctgtctcaaaaaaaaaaaaaaaaaaaaaaaaaaaaaggaaaaaaacagcaacctgggacctaaacagatacacaaaggatgcactggaaggtagagagtcagtgaatatgtatcagtagaatgtatgccttggtcacacttgctagggtcaatttccatacctcagacaagcatttgctctcatgttgggtccagagctcccctggttggacattgtattcaaagccacgctccagtttaaaaaatagaattgaggcctaaaggctttggttctaaccccagtcccatcacttaactagctgtttgcacttggacaagttactttgtttttatgaacctatttcttcaactataaaacaggaattttaaaaaatcctacctcaaggtatcatcatcaggattaaatgatatcatggaaatgaaacctggacacaagtggggactcaacaaggctgtgtgaattctgcacaacagtgaggtttagaaagtgctttgatcacctagatacgccatttttcaaatttctcttttatttatattcatcccctaaaattatattaaggcttccttactgctgtggactgaatgctccacagcctgccacaaattcacacattgcaatctaaatccccaatgtgatggtatttggaggtcaggactttggaaggcaattaggtcataagagtggagccttcatgataggatttgtgccactataagaagaggcacaatagagatgatctctctcagccaaggtgacaatacagcaggaaggtgccatctgcaaaccaggaagagcatcctcaccagacaccaaatctgctggcacctggatcctggaacccatcccagtctccagaactatgagaaataaacgttagtcatttaagccactcagtctatggtattttattacaaaagcctgagccgagtaagacagactcatatagtgccagtccactgaagtgtcttttgaatttctataggtaggacatccagccttgatttcttttccacatgtgatgaggacaagttagttaaaaagatgacagaggatgacttgggctaccctagatgatcctttctcaggaaagaatgacaaatcccaaggaaccaggtacctgctttctgagacacttcctccactcctcagtcccattcatatgtttgccctgttggtggcttttataaagtttattgagctttagtttgtctctgcctgcctttattgactatttaaacatgcctgaaacatctggtcccctgagagcttttaccaaggtctctggagtacagattaggttgtcatttgtccaatttgttgtcaaattcaaaagaagttcttctaaactgaggggattcaggacagctgcatggactcatctgtgagcacccactgagagggtaaaggaggttgaaattaagccctgagtcatgacactgggttgaagcatggtgagagggatgtcttctttgtaagttgactgcctgggggaaatgctttttttttaatctggtgattctcaaaggtcctgcagggctggctgcagtcctaaggacttttagtacaccttctgattgttcatctgagaaaattgagactggaacttatcagaactccttagagggaagatattactatatggacaagatctataattgctctcaaggcttttcatggaagctattatctatccaagagagaaaaaaactcagctaatgtccacagtccaagctaacatattgagtaaagggcctcagaaaaagtaaaagaaatatacgccattttaaaactacaaaagttagtcttcacaggagattcaagttgtcaagaattggtggtttcatttcattcgcttaagttatttaacaaaacaggatatttatcaaaacaaaatagtgtcttcacactattagacattctcctctattaagacaatagccatctgctggagtcatatgtttactaggacaagaatttttggtggggtgtggtggttgacgcctgtaatctcagcactttaagagactgaggcaggcgggcgacttgaggccaggagtttgagaccagcctggccaacatggcaaaacctcatccttactaaaaatacaaaaattagctgggcatggtggcgtgtgcatatagtcttagctatttgggagattgaggcacaagaattacttgaacttgggagtgggaggttgcaaggagctgagattgagccactgcactccagcctgggcaacagagtgagactctatctcaaaaaaaaaaaaaaaaaaaagaattatttctcattctacacctgcattattgaccatttcaatacatgtttgtaaactgaaatgtcttctcaggcttgataatgtgtcaaactcttcttcaatatagaaagaaaagttcagcaaagagatctattatcaaagttgccatgttccttagatatttatgtttgcttcttgcactagagtctgaatccccatctcccaccactgagtgtggatattaccctgattcttttccagtgcctgatttagatggatactaaataaatgcttcctgttttaatgaatgaataaactaaagttatgtcattacattgtctttcttttcaaaccttgatgtgaaatttgttctatgttggcctggcaggaaagtctccttaatgctggaattctcacataatataagttatagtatattccatatactgtataatagtatatgttacaaatgattatactatacaataacatactattattataatataataataagaaggaatgtattcttgctggtgaaaaatgttttttatatacacatatttgaatgtgtgttttatgtttgttatactctttatataatacactttataaaacacacacacacaaacatatatatatgaagattttctgttactttatcatgatccctaacaaataaatagccttgtctagccattgttcggaattgggaagtagacaaaatttctcattgctttcaattgatgagacagatgtcccaagtattgtctttcctgttcaagtagacataacctggtaaatgtatgcattttaacacaataaggatgcttctctagaccatttttccttgaagcgtggtccatggacatcatctggggacttgatagaagtgtagaatattgcccctatcctagacctactgaattagaatccacattttaataagattctgggttagaagaacatagttaaaccaaaatttggagacctcaatgactgctcagctataccgtgggaggtagtcaatgcctacgacaaggaagtccctactatccctcccagttcctgcatcttcctccttgaatttgcaatagatgggagggcagtcattcctaaacccatccttttctctcagaactggtgactggggcaaaatatgtgctttaagtggaattaataataaaatattaacccttcatgaatttgtgaaaatatttcatcctatgtttgttttctgggcttgtcagcctgggctctccttcttagaatgaagtcactatttatcttgctcttatgctcaaccttgaacagactgcttatgaacatttagtttttagtgttttctaaagatgatgacgataatgataatgacagtgatggtaatgatatgctgagagtgcttcaaatgcctcctcctaatcattctcaacaatctgcttagaattctaagtaaccagtgattttcaaaccaagacctgcagaggcctaggtgctgggtcactgcaaggggagaggaaggcaggaggtaggatggctgaatggcatggctgacccacagggactgaggttaagttccagaggatgggggacacaaacccgagcatctttactttcatctgcttttacatattgaagcctggcaaagccatttttttaacataaatttcttaggacctaatattctcctactaaagcaacctagattactactgtgatccataattagtatatcttgaaatacttagtattcatattttcctgggaaggaaagagaaacatttaagagaataaaaaattatattttggcttgaagcatattcttcaatccatgcaggttgatagactttgtttgcatatttcaaattcagacttaggttttagtaataccatgagatgttatgatgagggaaatccagtactgacaacattttaaaagttttaaaggccctgaattctttgaaagaacctggaacacacaactaagaaatgtcatgggagagtctccttgtacgggtacattctgggaagggtgatgaaaagaaaaaaatctccttggaatgtgttaaattcagtttagtctggcatcaaaggaatgggctagatactcattagtgacctgatctattacaataattctacacttccaagtttacttttgaattcctgaggtagaaatccattttagttgagaactacaaaactggcaaattaattgtattgacaacaaacccaaatttccaatctttccattgtccattccttttgccatcacttggattcataatcttttcaatccttagaaacacattgaaataagaaggaacaggaattatattcatttcaaaattgttcctaggttatgtgtgtggcagactatattttccaaagacaaccagcagatcttgctcctacagtgtgatggtgacaccacttccatccgataggggacttatgtccttttcccttgaacctgggcagaccttttgtgactgccttgatcaacagggtatggaggaagtgacactatgagattttcaagaccaagtcaaaaaatactggcactcaattctgccttggtctccttgatcactagctcttgcgaatgcacctgccatgctccgaggaagtccaagccatgtgggtagaccacatgtaggtatcccagcttacaacctcagtggagcttccagccaacaaccagcatctaccaccagacatgttcctcagggagcctttacatgactccagcatcaaccacaatttgactgcagcctatagaggaagaaaaatatcatttccttctacccatcttaggttattggctgaaggccttgtaacaaaagacagatgaacaagagaaaaacgtgcatttttatgcaatataagttttacatgtcatgggagccttcattaggaaatgaagactagagaaagcagctaaacatgggtgtttgtatggtaggttttgtgaagaatggaaagtaatggagaaatatgacaggataaaaagaagagtctgagctaactggagaaaacggcaagatgtgtttgttcagattcttgttggcatcccttatcttggaggtaaagatgttcctttactctgggtatagggaggacacctctcacatgagggtcttatgacctgcttcaagggagaagggtaggggaaggtcagagaggccttcctgcacatgctgtttctcaaattatttcagcttaaaatgtttaatatgccaaggtgccatattttggaatagcatgtcacaaactccatcaagatccatgacataccccaccaagctgaaccccagtcaactctcaaaaccatgagagataagaagaaaatgcttagagttggtttaagctattgattttggagtgatttattacacagcaaaagagaagttaacactctgttaactagggcagaagaccctgtgatcctgaatggtcaactaaattttcttccctgaatgattatctcatcattagaagtagatggtattaattttaggccttaatagccttcatttcctaagggagctgctggacttagtttataaaccaaacacatcattctaccctcaaaaccagcacctctttccaactttcctactgctgttaatgacaccaattttccaggcacttcaggatcatctctgactagaaatgtctccattttcagcatattaaccactccgttatcaaggtcttttgatactttatatttgcaatgtcttctaaattcagatacgaaaatttctctagcaactttcagcctgttgacctcctgcctccacatccccagtcctaccaccataatagcctttttacacattacattgatcatgtcattctattgccccccaaatcccctctcctgcaaacagttccactacttaaactagtgttgcagactaatgtactgataagggctaatcaagtaatgggaatgagtaaattagggcatgtgtaagacaatagtgagtgagggaattgcagtaaactagattatgcatttctcatctaagagaagtagaatcgcccaggtcacaattgttctcaaacagaaatgcaggcccagtattttcacatcatgtgattttttttcaagggaagatggcatatttctatgagatatcacccatcagatgttggcatctgagtcagtccgtttttactgggtaatacaccattccaaaacatagcttaaggcagcaaacttttacatagtggatgattctacagattagcagtttgggctggactcaactgggtagcttttctgatcttagcagggtttccttttagatctgtggttttttgctatgttggattggggaagggatcagttcttttaggaaagggtcagccatgagggcttgtctttgctccataagtctctcatgctccagcagactagcctggctttattcatacagcagagtcaaggttccaaaaataattggaaacagccaaggccttttgaagcctaagcttgaaactagcacagcatcatttcctctgcattctattgtgcaaagcaaatcacaagactagttctgattcacctagtggagaaattgactacatgtattgaggggaggagataaaaagttacattgtagagtgaatggatattggaagtagaaaaggattaggatctttcccacagtctgccaaaatatttttttaaactttaagagattcctgctaaaaagaatatgaatcaaaattatatgtctccacttggctacctgtgcttccctcttatgccctcactcatagagccacacttttctcttaccctttctctttctccttgccattattaatgcattggctccaagcacagttccatgcaggtcatttgtccttcatacctgccctgttcattttcatatttgaatgtgaatcctttgctcactcattaggaatggcttttattacctcttctgtagttcattttctcatttcctcaaaagcttcctcaaatctctgcatttccatgaagcattctttaaatgcatcatatttaatctcacccattcattacattagctcgtggggttttttttgcacgttatttatactttgattgacactactttatattgttctttaatatttttgcttgtgaatgctttgttttctcaccaaaattataagtttttagaataacaaaaccatgcaattttttcatgtagtaatcacaaattgggatatgtattatcaattagctattgctgagtaacaaatagtcccacactaaatgatttaattatacccatatagttagttcacagttctgtgagctagcaatttagggtagacttagctgaatgattctccttgttctagccaggtcccctcatatgggttggttttgctaatcttgctgtattctcccacatgtctgagtcctcagctgggtgaaatggacaaatttgtctgtgatccacatattctctcttcctctagcttaggcttgctcaccatgtcacagctaggaagagtggcaagaaaatgagtgaaaactgccaaggcttattgagcctaggctgagaactggcaaattgttacttctttgaattctgttgattaaaggaagtcacagggccagcccagatttaaggaaggagaatatagactcttgtcttaagaggagaagctaatatcacattgcaaagagattttgatacagagaggagagtagttgcagccatttttacaaataatctaccaaataatgctggcctggctcctatggattcttggaggaaccacatctgtttatccttctcattgtgtggaatttctctttcctcaatttgagctatgtcattagtgtaaaaattgtatcttcttccataatcaatgctcctctggacaaaataattggataaaggctggcctcctgtcccaaatatgttgatcacaataagttatctaccatttttcctcctgattcctgtaacagtgacctctaagactggtctagagatgtgcatacaatctaagcttttccagtgagaatacttctccagggcttttattattacaactggtgataaaaagctacgtttttctcctttgttcttggactaagagcccagccctgccatcacccatgtgcccagctgcataaagaagcctgccttcagtagaaaagctaaaactcagagaaagcagagctgatgatgtccaggtccctgctgtagcttcttttctacagattacttatgcagaagataaatttttctggtttcgcttgtgctggttcaaattgagtttctctcacttgaaagcagagaatcctgacaaatacattaggagtatccttcataatccagcacagtgctaggtccaccatgggttatttaataaatacatgttaaatacaaatagaaaataatatgacgtgatactatacaacccaaaagaatgactaaatttttaaaagacagacaataccaatgtcagtaaagatgtagagcaattgggacttttatacagtgctggtgaaaataaaaattaacacaaccattttgaaaacctctttggtagtatctagtaaagctggctatatctgtgctgcactctaggacccagtgattctaactctaagcatacatacagcaatactgtaaagatatgttcaataagacatatataagaaaacactactcatagtagcccaaactagaaacaacccaaaagtccatcaatagtagaataaataaattgtagcatattcttacaataaaatactatacagcaatcaaaatgaatgcaccacagttaatgtaacaaacatagatgaatctcaaaaacataatgatatgatttggctgtgtccccacccaagtctcatcttgaattgttgttcccataatctccatgtgtcatgggagggacccaggagaggtcattgaatcatgggggtgattacctccttgcttgttcttgtgatagtgagagtgagttctcacggtatccaatgatttcataaggggcttccccactactttgctctgcacttctccttgctgctgccatgtggagaaggatttgtttgcttccccttctgccatgattgtaagtttcctgagatctccccagccctgtaaaacggtgagtcagttaaacctcttttttaaacaaattacccagtcttgggtgcgtcctttatagcagcatgagaatggactaatacacatgatattgagcaaaagaagtcaaatacaaaagagtacatcctgtatgattttatttatagagtacaaaacaggagaaactaattttcactgctagaaattagaataggcattatccttgtgggggagttgttactggaaacagaacaagggccttctatactggctccatgggtgcataaacttatgatttgtgcactattctatatgtatgttaaacatcaatctaaagtttacttaaataaattgaagaagaaatggttctgtggatctttggacagttgtatgctggccaacttcttcctctccctccaagtgctgtgcctgacgcctcctttctctgtagtagaggggagaggaggtgagaactgtaagaagcacagctatccccataaaagagcaaagccatcaagagaaaacacttctgtgacaagggaaaaacatgttcctcgactttccccatctgtcacaccatatgccacaccatctatcaacactcaatttgctgtatgtagttgaggacattccttccacgtaggagaataacttaccccaattagatcttaagattaatttttttttgaatcttgatgctttgtgagtcattatcatttcaggcagccttaactgaacagaattggatcttgaacttaacaaaactcagaactccacacctaaaatcttaaattccaaaaatcccatgacagtccataatcctttgactttcatttctttcttccaatttctctacatttggacttcattttaattttaactccataggccattctacttccaggcattatatgagcaccttctaagggtgatagtttccctaacccatcctctttcaatagctaattgaaatctattaatttcaattagtttaatcattaacttttattcctttgttcctttaatcttcaatcacatttgcccagataaactttattcctaccattcctcattgttttaagttctatatttggtcttttgagaaccaatggtgaaaaatcacagtgatactcctacaaattcatgctctccaaccaatgcctagctttcttccttgcctggtaactctctttcaagtccatagttgattttctctctaattcccctcaaggacagttccaaatgtcaccctttctctcatttcagcagctttagtacctcctctcacttcttatttccataagaaagcccatctggagagctctgcctcctccagggctagttcataaatgtgcaaaacctgtgtaaccacacaaggtttctaagggtcttctcagccccacacttagaagagccctgtgcttgctttaatgctctgcagtaactatcttgaaattcttaatcattgtgaagaaggggtcctcaattttcattttgcactgaatcccacaaatcatgtagctggccctgcctcctgccaatagaaacatgtcatttatactcctcttggcattcctgcctcaggattaagaaggctctcctccaaccaaagagaattctttttttttccttttaagtttttttaaattgagatacaattcacacaccatcacatttatccatttaaagtgtacaatgcagtgatttttagtatattcacaaagttgtgcaaccatccccactaccaaattctcaaaaacaaaaaacaaaaaccctataccattagcagtcattcataattctcccctcccaacagcccctgaaaaccactaatctactttctgtctctatagatttgcctattgtagcattttatacaaatagaatcgtgcattatgtggccttttgtatctggcttccatggaaaccacctttgcagaattaagtcaatgagagaaatctgatatacctgactccatcttgcttctaaccttacaagctgtctttgctcattcctgagcataggccaaactaactatgggaggaatttagttcatgttttaaccataaagcaaggataataatagctccttcccaaaactactccctccttgtttgggaactgaaaccacctttataaaactaatgagaagccacaaaattagaattacgggagaggtctgaattttgctaagacctgcttatagttaaaagataactagtcattgtgtttgctcaggggtctcatatgggtggtcacaagatttgtaacttccctaattgctcctacagataacattgctgttgcaaaacctgaaactggtgtttgagatatttttcattatttttcattctggcaattgattaactacccataccaaggatctgattcaacttggccctgtgacccccatgtaggaaatggctcagcctaagaagacagcttccatccactatgatttcatccccaacccaaccagtcagcattgtccattctctaaccccctgcccaccaaactatccttgaaaaactttagcctctgaacttttggataggctgatttgagtaataaactcccattcttccatctggctagctctgtgtttattaaactctttctctactgcaataccactgtctcagcgaatagctccatctgtgcatcaggcaagaagagcctatcaggaaattacactttcacctcgcataatgttttcaaggccaaggtgaattcttgtgttccttctttggaccccagcctctcctactgtagagacaaactcagagttgttctcactctccatcgttccttttacagatcctgagtagaaggtgagtcaatgtaattaaatcctttccaatctttacaacaaaaccaattccttcaatctcacaattgcttccatgagtccgtgctctctcattttctccctagccaagcttcttagctccctctgctttctcgtctctcatttactcactgccttttcatgtccggcttctgttcccaccaggccaaagaaaatgcacctgttaagtgacaaatggattagctaccaaaccaatgatgttttctgcccttggcttccttgaccttgctgcaaggtttgacatgattgaccgctcctttgttgatacctccttttccattacctctttttctccccctaaatctctctggctatccttctcactataatttttttccagaatcttcatgtttcccttgatctccaaattccagcacatctcagaattctctatttggttcttattctcattctatatattttcattgggaccttcatccaaactgaactatcacatatacgttaaaaattcccaagtcaatgtttctagacatgctttttatcctgagtttcaaacctatatgcaaaggtctattaaatatctctttacctggatatccaccaattcttcagcccccttaaatatgcttgtcgttaaacccacaatccttttccaaacatattcaagtgaattagatccttgtctatcatccaaactattctgtgcagaagctgggactcaccatggacttcctcttacccatacacaattaatctccaagttcattccccattctccattaacatctcccaagcattgtgttagtctgcattctcttcctccccacccccataccacatcaccattggtaaagacctcagcctcaccctgccccaaacaatccgtcccacagtgcttgcagaataagctttctgaggctgggcacagtggcttatgcctgtgatcccagcactttgggaggccaagacaggtagatcacctgaggtcagaaattcaagaccagcctagccaacatggtgaaaatcaatctctactaaaaacacaaaaagttagccagtcatggtggcatgtgactatggtcccagctactctggaggctgaggcatgataatcatttgaacccgggaggcagaggttgcagtgagctgaggtcgcaccactgtactccagcctgggcaacagagtgagactccacctcaaaaaataaaaaataaaaaataaaaaaagaataagctttctgaaacacatgtcttgttattcctttcctctgctaaactcttagcttggtaactaaggcctaaactaaactacccctatgactttcttttccactgctctaatcagagcatgtcatatgatttcacagctctgtctttaaatacatatttttttctctaccagaattatccccatccactaccccatttctcagactaaataatgttctgtaactttgtaaaatattttcccaagagtttgctcttcccagaagcctaattggcacaatttagattctcctttttgcactcaacatgcacatctctctaattgcatgctagcagcatctattaatttacttgcctctttctcctacctgagtgcaagctcttgatcaatcatataccattttagtcttcatatgccagtgcctagtaatgtgaatggcacatagtaggtgctcagttaatgcataataaatgaaatgataaatcacttctagaggtcctatgcgattctgtctttttttttagctgattctcaaataaattttatacagaaagcagcacaatatactcaatggattggagacttgatggaaagcaatagaatcctgaaaactggtttgtggtcgtcaaccctttaagaatctgattatatctggattctgtccctaaaaaaaatgctcacacatacccaggggtttgtgtacaattttggtaaattcctgaaacttattcataggctctgcttgaaattttaaacctgagttctgctttctcctgtgcacttctgagcagacctagctcccaagaggaagtccctactcactaccaggattgaaataagcagactagcttgagggcatgaggacttgattaaatgtattaacatatcaaaggaaagatgtgcacagcagaagggaaatagcttagccctggaaacacataaaaatatagagttgttgtctgtttgttttttggttttgtttttttttttgagacaggatctcactctgtctcccaggctggagtgcagtggaacagtctccactcactgcagcctcaaactcccatgctcaagtcatctgcccacctttgcctcccgagtagctgggactataggtgcacaccaccacaccagctaagttttctatttaatttttgtttgcttttctgtagagaccaggtttctccatgttgcccaggctggtctcaaactccccctagcctcaagcaattctcccaccttggcctcccaaagtgctggatttacaggcatgtgcctataatgcctggccaaaaccagtttgataatgacaaaatttagcagtgtccaccttggcaccattggatcaaagtgaacattgcagttgtagcccacagaaagcatatccgatcccagagacaggaacttccctggtgggagacagaggcatcaggctcttccaaacctgagccactaattctaattctcctttatcattcagttacgtgacaaatttttattgagcacctactatgtcagctactgtgctggtgaaatcatcctatccccacagagttgacaagaattgcatgctgggttctagacagaaatatagttaaaattaagcattaatcaggcagcattttggcccacttccttgttgctaaaagtcatatagcgctagatgctagccatttgcatccccattttccccatggataggatttccaaagttttaggacattggaagtcttattattggaagaattgatttgcaacccatcattcccatagacaggatctctgacataggaatcataaggctcttgtttaaggattccttaaaaggttttttagaccctgaattccagcaaccagtttgaagactcccacagaggaactggatcagcatgagaatacagcgtctttacctccctgtcccatgacttcaccctgcactcttcaaccagtcaatgatctccacacattggcccactcccaaacccttagaaaccgtaacccccgattcctctgggaggtggatttattattccctcctatccctcatttggtgaccctgtaattaaacctttctctgctgcaacccagtgtctctgcatattgactttctatgttcatggggcaatgaatctattacagttacaatagggatggagaaacaagggtgaagatgatagatttgaactcagctctcctggagtttgccttgtgttttgtttccttgcttactcagcaaccctctgattccaatactgcagcagcctttaccagagattttgactattagatattacaatccaattattttcttctctttagtgagagatatttctagctgctctgagtagagactccaaaaaaatacaccacaaaacagatcttctaccagtaaaaaataaaaataaaaaagccacataagtgatgtccttacttatatatataaatggaggtctgttggtgccattgttctagaaaatggggaattaaaaagcaacaaaaacaaatttgtgttttgaaaagcttgggggggacaaggcacggtggctcacgcctataatcccagcactttgggaggctgggtcgggcaaatcacgaggtcaggagtttgagaccagcctgaccaacatggtaaaaccccgcttctactaaaaatacaaaaattagcaaggcgtggtggcatgtggctgtaatcccagctactcgagaggttgaggtaggagaatagcttaaacctgggaggcggaggttgcagtgagctgagatcatgccattgcactccagcctgggcgacagagtgaggctccatctcaaaaaaaaaaaaaaaaaggaaaaaagaaaagaaaaaagaaaagctcaggggggaaaaggctcctgaataccttgtgtaggagataaaggtggggtaatttttgagatcctaaggaggaagtagtccttctccagtgtgaaggtagctgtaatccttggggctgctgcagatctaacagctcacagcctttgatctgagaaacaccaggcatcaccttgaagctgagcaacaggaatttaggttttactaccacacttctgttaaaaaaaattgtcaatggttctgctagcaaagacaggaccagcattcactggagaaacatacaccccactcaccaacattttctctaagtcactctcctcttaacacagcattgatcgaccttagcctatttggcagtaagcaccacagctgggcccgtcatccaaccccaggttgaacccagggagctttggtcagctgggatgagacctccctatactgagttttgccctgctgacaaggagaccactatcagagttgctactgctggggcaacatattgacacttggggttaatacaggagcaagaagcccctcgccctgcaccggcttccctccctttaatgattcaacaaggacagcttcgactcagcaagcaggctccctccagcatggtctgggtgctgagatgggataaagaaggaaggtactatttccctgaggtatggctgtaagcacactgggacccccgagcagacactcacaggagggggagagacctggccattatcctagctactatgactggcatttgaaagtttgaagtagtgatcgggaaactttttctaaaaatagcagatatttcagttttgcgggccatatggtctgccgcagctactcaacctgcctttgtagcaggaaagcagccacagacaatgtatctaggaatcagcatggctggatttggctgctggttgtcttttgccaatccctgcttcagaactgcactctgggaaatggcttgtggcaccacaagatgtgtttgactaccctgggactcactccatcctaacaattcctcagcctccacctttgctctgcacagggagaaagcagaaataagcaaatcctgatttagcatgtttagatcttcgtgcctcttaaatgaacaaacttggctaaaggaagcccatccctgagggattggacctgtcctcactggtttttgagcttcagagcccagggtcattttaaattctccaaactaatgaatgcctcacattccctctgggggaatggccagattttgtttgtttgctggttgcattgtactgccagtactatttgtttgccttcttgtgaaggcagtgattctgatatagtatgtggagagagaatgagatattgggactcaggcaacatggtgccaaatctcaacccagtctctaatttggggaaccatttgtcctcccatgttcagctctgtcactgtctatcagggattccagcccagggccctgggatctcacagagcatcacaaggctctggaaagagcatggtggaagtgctctgcaaacaggataattccgattcttacactgaattattcaagatgtgctatccctttggttttctcatctttaaaacagtgatggggctgggcatggtggctcatgcctgtaatcccagcactttgggaggctgaggcaggctgatcatttgaagtcaggagttcaagaccagcctgaccaacatggtgaaaccccatctgtacttaaaaatacaaaaattagccaggcatggtggcgggcgcctataatcccagctaattggaaggctgaggcaggagaatcacctgaacccaggaggcagaggttgcagtgagccaagatggtgccactgcactccagcctgggcaacagagtgagactctgtctcaaaaacacaaaacaaaacaaccaaccaaccaaacaaacaaatatatatgtatttgttttatatatatatgtgtgtgtgtatgtatatatacatacacatacccacatatacaatagtgacggaaggtgctatgtcctcatagagttgtggtgaggattaaatgagaaaatccatgtgatgttatctgcatgctctctggcacattccaagtattctatccatgcttttgtcctttctgttgttttagaacagttctctgcctcaccttattttagcatagtcatgaaaagcttctggggtgcagtccatgctatgcccagtctgaaaccaagagtagtttatggtcagtagccatcatcataagtaaccaggtcctaagcctactctcaataataactacagcccatcagagatttccctaaatcagctggcctagaaaagcaggacaatgccttctgcaccatcatctacatcatttagtttaaatggcagaatctgaaagttaattgctttatttattcatctgtccttcaaaaaagcctttcattatttattattgactactttttgtaaggtgtcaagaatatcctctaaaatggacctgttttgttttgtgttttagagggtctagggatgaagaattttttttttaagaaaaagaaatgcatttctagcttatcttagttctcacctcaatacttgagtatctccttcattcattcattccttcatttattcaacaagttttaactgagctcctactatgtgtagaagcaatcatagcagtgagtagaacttatgtttcaatgtagctaagagataataaacaaataaaaatataagtgtatagtaatcagctatcaaagagtgctacggaggaaaagtaagtagaaggatgggaatgctggagatgggggaagacttgctgttttatagaagatgactgaggaaggctgcacagatattcaagccaagatccccggaaataagagagcaggctatgcagatgtatgcaggaaatgcaaagaagaggctacagcaaggtttgtaaactcatgggatatcaaggaagcttgggtgcctgaagcagagcaagcttgcagtgaaataagtgatttaaggtcatagaggtgagggcacaaaggggccatcatgtggcaccttgtagttttttctgagtagattgagaaagcctatgatggtttgagcagaggagtgacaatgtctgtgtgctggctggctgctgtgggaaaacaaactgtaaggagaccaggggggacataggagtctcagcaaatccagggagaagagatggagcttcagtacaaggtagtgatcagtggaggtcctgagaagtggtagattctaaatatacttcaataaactgttgccagaattggctggatggatttggatgaaggcaatccaatttggtggattgggtgtcacatgtaacaaagaaagaagagtcagatgattctgaggttatgcaattataaggtgagcaggaacacatgactccagagcagtgcttctctaccgtgaatgagctcacaaactacctggggatcttgttaacatgaagtttctgagtcagcaggcctgggaagggcctgagagtctgcattttgaaccagcttctagatgctactaataatgctggcccatggaccaaactttgagaaccactgttagagaaaagtaatgcatcttagtcattaataaactggtctttggagccagaatacctaggttcatgttctggctccaccatttcctaccaatgtcactacagataagctaggtatttacctgtgcctcagtttctttatctgtatcatggggatcattgtgagaatttcatgagtcagaaatataaagtacttaggggatgcgagaatagttcaacatatgcgaatcaaaaaacatgattcaccacataaacagaactaagaacaaaaaccatttgattatctcagagaaagcatttgataaaattcaacatcattttgtgatacctttgacaaactaggtacaaacagaacatacttcaaaataataagagccaaatatgacaaacccacaaccaacatcatactgaatggacaaaagttgaaatcatttatcctagtaactagaacaagacaaggatgcccactctcaccactcctattcaacatagtactggaagtcctagccagagccgtcagacaagagaaataaataaaaggcatccaaattggaaaagagtaagtcaaattgtatctgcccactgataacataattctatacatagaaaaccctaaagactcctccaaaagactcctggacttgaaaagcaacttcattaaagtctcagaatacaaaatcaacatacaaaaatcagtagcatttctatatacccataacgttcaagttgagaaacaaattaaaaactcaatcctatttatgatagccacaaaaataatctaggaatacatttaaccaaggaggtgaaagatctctacaagaaaaactccaaaacactgatgaaaaaaattgcagacaatgcaaacaagtggaaaaacatcccatgcttatggattggaagaatcaatattgttaaaatgaccatattacccaaagtaatccacagtttcaatacaattcctatcaaattaccaacatcattttttacataattagaaagaacaatcttaaatttcatatggaaccaaaaaaaagcccaaatagccaaatcactcctaagcaaaaaacaaacaaatccagaggcatcacattacctgacctcaaattatactacaagcctctagtaactgaaacagcatggtaccagtacaaaaatagacatagtgatcaatggaacagagtagagaacccagaaatgaagccacatacctacaaccaactgacattatataaagttgacaaaaataaacagtgggaaaaggacaccctattcaataaatggtgctgggaaaactggctggccatatgcagaagaataatctggacccccatctctcactatatataaaaattaactcaagatggattaaagacctaaacattagacctgaaactataaaaatacttgaagaaaacctaagaaaaattcttctggacattggtctaagtgaagaatttatgacgaagaccccaaaagcaaatgcagcaaaaacaaaaaataggcaaatgggacttggagtaaaaagcttcagcacagaagaaaaaaattcggcagaataaacagacagtctaacagaatgggagaaaatatttgtaaattatgcctttgacaaaggactaatatccagaatctacaagaaactcaaacaactcaacaacaacaacaacaacaacgacaacaacaacaaaaatccatgactcaatagtcatggattatttgttgttattgtattagtctgttttcatgccactgataaagacatatcctagactgagcaatttacaaaagaaagaagtttagtggacttatagctccacatggctggggatgcctcagaatcatgactgaaggcaaagagaggcaagtcacgtcttacatggatggcagcaggcaaagagagagagtttgtacagaagaactcctctttttaaaagcatcagatctcatgagatgtattcattatcacgagaacagcacaggaaagatgtgcccccatgattcagttacctcccaccaagtccctcttacaacacatgggaattcaagatgagatatgggtggggacacagccaaaccctatcagttataatatcaatttagtaattcacattcatcaggaaaaaaagaataggtttttaaatattaaggctatgcattgttccatgactttttttttgtatgtgtgtcttagatcatgttgtgaaatgtatttcttctatgcatttcttctgagggtcttggtcaaaaaatgtttaaaatcacttgctataaacaccaaagcaatgtaactttcaaagattaacctggtgtacagcaccaccacataacaaattcagaccagcatcctacagcaatgggcaggcattcttggggctgtgcaaggtttgtgttcagcagtgaccccatgtgatagcaaagcaaatgcattagactggtcagcgctaccagtcccctctctgcctgatgatgggaaataagtctgaccccattgaactgagctagtgacccatatgcactgaaattctggacaatttggggaggagagaagcctcaggaggcatcttgctcagcggggctgtaacaaacatgatatagtaatatttatactcccagctagttcaaaaggttatgtagttgcaaaaggttttcttaaagatttttgtagggagaaaccaggatcttcaaaattgtgttgtaaaatatgttgtttctcagtgaaagtccttccagagtggagggagccagatggcagcaaggtgtacgcctaagaagctgagaaaggttgcaggtagaaatagactgaataatcagtgactatacttcaggggtggttgctgtaatatgatacatgtgtgatatctgatgttataaattaccttatattctctgctaataattctatagtaggacaaatagttaatacagttgtgtgcctcatcatgacttttaggtcaagaatggaccactgaagtgatggtggtcccataagattataataccacattttactgtacctcttctatgtttatatatatgtagatactcaaatactttgcattgtgttccaactgcctacagtattcagtacagtaacatgctacacatgtttgtagcctaggagcagcaggctatactgtatagcctaggtgtgtaataggctacactatctaggcttctgtaagtgcactctaggatatttgcacaatgacaaaatcacctaatagcacttttctcagaattttatccccatcattaagcaacacatgactatatgttaatatttggttttatattactaaatccaaacaaggaaacttgttttaggagggcagaattttcctttttatcagtatgctgcaactattaacactggtactagttgtgacagcctaggtttttgtcccaaattgctatttaaaaacccaatattaaatggaataagtagagaaaccactgcctcaattagcctaatagaaagtgtaggtgaagagggagtgtagaaggctttgttggtatagattcagatcccaggcatatgtaaggatggcttcagccttatctcaagtagtttccctaaatagtcccatatattttgcaagaccagataccacttgaaaaaatctctcttccagataataatcatggtaattttaaaacatgtcctcaaattctgggggctctgcctgtcaaaagatgggttctatgcgcccttaatttgagtctggaccaaccctggtgacttgcttgtagtcaacagaaagcagcagaagtgacaccaggtaacttccaaggctaggtcagaaaaggctatgtggcttctgctagttctcttgtgatgctcgttctggggaagccagttatgatgtaagaaatccaactaccctgaggccactatgttggaaatgccatatgaaggtgcctccatcaagggcctaggtgagctcccggctgacaaccagtatcctatgtcagccacaagagccaccttggacacctcgccaaagtacagtggtgtggtcatggctcactgcagcctccacctcttgggctcaagcaatcctcccacctcagccttctgagtaactggaaccacaggcatgtgccaccaagtcccactgatttttaaaattttttgtagagatagattctccctatgttgcctagggtggtttcaaactcctgggcttaagtgatcctcctgactcagcttcccaaagtgctggaattagaagtatgaacaaccatgcctggccaatcatctttcattacaaaaatcacagaaataaaatcttcctaagattccctaactggcttcaggaggtaatgttttctggttaaagctaaaaacaagcatcacaaataaattttgcaagactgcacatcacttgaaaagtctctcctccagataataatcgtggtaattttaaaacgtggcctcaaacttgaagggactcctcctgtcaaatgatgggtcctatgtcctctcctcttgaatctgggccaatctctgtagttagaaattagggctttttctaactacagagagctcagagagcaaaaatatatgtaaaagtaaactgtagctaattcttaaaaataggaactatgctagcttagcaaattcactgattagagtcagatttacatttctgctttcagctgtggtcatttgtgtatttggacaacagataccctttgatccagattgaaggcccacgatgtcaatgtgtcactcctcacatctcacattggggaacacacatgcaagactaaaattggagtcaacactaacaaggaggcatgaggcagtctgcaaaattaaaccaactgtcaaacagcacaattagaagggtaagggtcacttaagggagcaaaggatgatgtttctggatgagagagatgagctaattgtccccattgggcaagggtatggttctgaggttactggcattaagataaaaagaaaacatgtcagttttaggatctgataccagatttgcttcttcaggcaaactcctcccaggaactgaacccctgtattgtctgggtatttgtagaatagacagtgcttccaaccacaactttgggcaagacatagaaatttacagttcatttaaaatgactgagaaaataaggaggtgggtacagtagggtgtgcctggaggctaaggctggaggatcacttgaacccaggagttagagactaccctgggcaacataacaagaccccatctgttaaaaataaaaaattaagaatgactgagaatatggtccataatccagatatgcagagaagggcatcttgctggtgctgctgcgatactgctctcatgtgcagggtgcccacaggctgactttctggtggaagcctgtgaagatgtttccaagggcatagttccctggcaagaagaagttctctactctacagggacctcatcagactcttctccatctctttatcttctaccctcaaggtgtaatccacagctcatgttgtcccctctgactctctactggctggggtactgaaaagacggctcaggatcaggaccctattgtccatttgactcatctggaaactcaagaacttcccctattcagaaagtggaggtggagctgctcccttccctctatcatctctcaccaatcactttaatctgatcaaaaaatccagagatagggcaacaaatgcacagagcagtgaggcaaagaaagcaagtccctctttcttccaagtaaccagacttatggtgcccttttcccttgactggaggaagggagcaccttcccttcccatatcctataggacggagtaagtttccacctgaaactcaaccccaaagtctccaacaaaatctgctaattcttttttttttttttttttttttttttgagatggagtttcactcttatccaccaggctggagtgcagcagtgcgatctcggctcactgcaacctctgtctcctaagttcaagcaattctcctgcctcagcctcctgagtagctgggattacagacgtgtgccatcatgcccagctaatttttgtatttttagtagtgacaaggtttcaccacgttggccaggctggtcttgaactcctgacctcaagtgatccacccacctcggcctcccaaagtgctgagattacaggcgtgagccaccatgccaggccctgctaattctttttatataggctggcagtaggggagtaatggggagacagttggagatgcaaatcatctgagaaatatctggcagctctttagtttccacatggcatttatctccacctctccatcgttcaaagacaactaaaaaagttatatgtaacattctcttgcacctgccccagttactcttggtattgatctagttatctacttcaccttccagactgtgatctccttgaaggcaggcatgtatcttcccatctagcatatctgaagaactggataaatatttcagtgaacagaaccagttttaagattgggacttcacttaccttgaaatcgttactgccagctttcatttcagcagagatttttatgatgcagattctaagaaaaattaattacctaggtatttctgaacttgccgaactggaagaaatgtgttcttaggataatcaaagcctggctgtgtggctcagttagaatcagagagggtaccctcatctagcctcttccaaaataccgagccaggtggctggatgaaaagagggtttgactccctgagactgcaggcaggagatgagttcctaataaataggtctcctttcgttattgtgaaataagatcagtaacagcctcagagtgagcagagataagcctttgtgcctgtggggacttgagtttaaggggtcctacagcaacactacctatcatccacatagcttggaatggccagatacagatcaggaaagcaaaattcaactgtggtccttgaggtggcaggctcaaaaaggggtcaggtatttatttgctttctctttttttgtgtgtgtggttttataactttatttgacaagcagcaattagctctcatccacattgactgtttatagatttttgatagtaacaggtacatagggaacccaaatatagagcttatttgatgaagatttatcctcattacattttctggacaattgcacgtggatgggacatgccttattcctttggtccaaacagctttgttgagccaggtatcagggtggtggctgctgtaagttggggttgctgtggcacttacttaaaataaaacaacggtgaagtttgccacatcagttgacacttgttctcacaaaaaatttctctttagcatgcaatgctctttgatagtattttacccacaatgtaacttcttttgaaattggagtgaattccctcggccctgcctttatcaactaagtttatttaatattctaattttttgtcttcattttaacaatgttcacagccttttcaccaggagtaaatttcatctcaataaactactttctttctctgctcatccagaaaaagacaattgctcatccactcaagttttatcatgaaacagcagcaattcagtcacatctttaatctccacttctaattctaggttttcgttgttgctgtttgctattttcaccatatctgcagtgacttcctccagtgaaatcctgaacacatcaaagtcatccataagagttggaatcatcttccaaattcctgttaatgctgatattatggccatgttcattaatgatcttaactagatcttctggatgacttgttgcagcttctccatcagcacttgctgctccaccttggccttttatgttatggagatggcttctttccttaaacctcaggaaccaacctctcctaacttctaactttttttctgcagcttactcacatctcttagctttcctagaattgaagagagtcacagcctcactctgaattaggctctggcctgagggaacgttttggctagttggatcttctatccagcccactcaaactttctccatattgccagaggctgttttgctttcttattcatgtgttcactggagaagcactttaatttccctgaagaacttttcctttgaaaacttggctaattgtttggcacaagaggcttaactcttggcctgtcttggctttcaacatgccttcttcattaagtttaatcatttctagattttgatttcaagtaagagatgtgcaactcttcttttcacttgaacgcttagggggtattgtatggttgttaatcggcctaattttaataatgtttcgtgtcagggaatagggaggctcaaggagaggtagagagatggggaacagctagtttttggagcagtccaaccacacccaacatttatcaattaagtttgccattttatgtgggtgcagtttgtggtacctccaaaagaattacaatagtaacctcaaagatcactgatcagagatcaccataatatgtatagtaatgaaaaaattgtaagcattgtgagaataaccagaatgttacccagagacacaaagtgagcacatgttgttggaaaaatgttgctgatagacttagttgacacagggttgccataaaccatcaatatgtaaagaatgccatatctgcaaggcacaataaaatgatgtacgcccatgttatttaaaagaacatatcaaacccagagtttctctctgtctctcccataccaggagactgtggagctcacctaactccctttgtcttcaaagctagcacagtggagaacggttaggtgatgcgcaaggtcaataaaacatccacgttgtgcccagtatacctggagtccttgcccttgtgcagtacaaggaggagcttggtaggtgtcccagatctctgtgctgatggatttttacctacaaccccaaatagagaaatgcttaaaccttacttggaaacaagagagcgattttccttttttcagaaaaaagggagagtgacatacacattggtaatctactaattgtagacatatgcacagttagggaaaatctccagttagaaaacaggcctatatcccctgagggggttccatccacccttctcttttccagagagtagctagggattcatctaatgaaacagaagggaaagaagctaaaacaaggttatgaaatagcttccagaggaatcattaagtggattccaagttttaatatgccccaatacacattagattgaactaaactgtattaattactgtcaaagattgatcccattaatggcccaattattttccctctctatatccatgccccttgccctctgactttgcaagtcatcctactgaagagaaacagtcaattcccccagtctttaaataggctagactatgtgacctgcttcggtcaacaggatgcagtggaagtgatggtgtactacttctaagccttgacttcagagaatttatgtgttttcatctgctctattgtgcctctgctatcaccatgacaacattcttggggtaacctgctggaggatgagaaataaatggaagagatgaatcacccagtcatccaagtgaaggccagcctagtgcagctgacagccagcctaaccccagatacatgaatgagtccagccaagatcagcagaactgcctagctggaccctagctggaccctaactgaccccagttgtgtgagctatcaattgacagttttatgtcactgtggttgcatggttgtctgcttcactgttgtgtatggtgaccacggatgactgacataactacctatcttcccagtggtcaatttatcactatctaaacctcccaatcatctgtgagaaatgtgtcattatttgcactttgcagatgaggaaactgaaccatataatgagattaagtgatttgcccaaaatcacaaatacagtaagacagggagtttttatatccaagtccaggattttctctaatgcattacagatgagttggaagaaagcaaagggtttttaaaataaatatgattgcagactgacttcctgggttaaattcctggccttcccatttactagatttggaacattttgcaattttcttagcctttctgagtcccagtattcatttctgtaaaatgaggattatgtcatctgccttgaaggacattcatcctataaatattattgagtgatgactatgtgcccagtactcttccaagtgctggtgaaccattactaattaaaagtaaaaagatctcgatggggaaatctatcttgcatgtttgacttgcatgtttgaagtacagcttaaacttcagaaaaaaagggagcatttggggtatagacaaaacattttggtcagtgtcttggtcattttgcattgctattaagaaatacctgagggtgggtaatttataaagataaatttttatctttatacaaaggtttgtttggctcacaattctgatagctggaagattcgaaactgggcatgtatatctgatgagggcctaaggctgcttccactcctggcagaaggtgaaggagagcagatatgtgcagaggtcacaaggtgagagaggaagcaatagagagcaggagggaggaggggacaggctctttttaacaaccagctctcttttgggaactaatagagtgagaactcattaactgcttagaaagggtgttaatctattcatgaggattccaccatcatgatccaaacacctcccattacagcccacttgccaacactgtgacactggggatcgaatttcaacatgagatttggtggggaaaaacaaaccatgtccaaacttagcagccagaaacttgaaagaaggatttcccttcctaagatttattgctacactcctccctttgggattaggattggagagtagtgcttgaaaaacatctgggatctcagagcaaagggaaacaacatctttctacctcagtgcctccattctaggggactggtttgtgagaagacacagaaaaattcccatgccctgagaatagcataacaaaatcactagaactaaagagcacgacttcttctctagtggacatctcatgaggacccatgtcaacaataatccatcaaaagattcctgccccgatccccgacatttcagaaattcattccagaattctgacataaattctgggaaggaaacactttagagaccccagttaaattttcttgctgtactgaagggatgatgcttcaaaatgcaaattattttgagttataggaaatgaaattatatttttgtaacacaattttgtagccttagattcacacattttaattaaaattaaacaaatgtcgtgttgttgtttcttttaaaataaggtaaaatgtaatgtccaacactttctgtagaagagacagctagttctccaccaaaatgtgtgctttgtgttccttgatacagtgtttagctagaaagcagctgcccagcaagagatgacatttcccagaaccctttgcatctaggcaagaccttgtgattagtttctatgagcagactgtgagtagacatgatacatgtcttttccagtttgaggtctcttctgtattatctctttcctcatcgtcgtctaaattacataggcccctgaggctctgaggaggcagaaacacaaaatggaaggaaattgagcttctgaatgtttcctggaatgcccaccttttgatcaggaatgccaacatcacattgcgacataagcaagagataaatgtctcatgttaaatcactgatatttggaggcatttttttatattaaacaatctttatttgaaaaatagtaccttgcaatcctaacacgatctatcaaacttcagtgaaagcaatttcagcaacaactaatgaacagtagctaaactgacaagagatcaatcaaaagtattttaaagtgagcagcaccagctgatgttctggtgagtctctgggtgtttaggacctggctacagggaaaacagaatcaaatcagcaggtgctgtggacccaagctcacacatcatgaccagcctccctccttgggtccctagtaggccacagtccccctggtatttccaggcccctgtgggctataggtggagccctaggagccaaagggccccttgggaaaggctggaacttggcctctcagtcagccagcttctgcctgttgcatttactttctttccagagtacctggagtggtctctcagtagataaggtggccgcccagccttcctgggccgttttctcatagaagaggatttctctctgagaactggaagtgtcttacttctattcctcggccaggtcttgggccatcttcttgtagtgatcacaggtatgtaagacacagttcaagttttagtacactttactgaggtccaagcagtagacttcctgctgagaccccatcgtgtgttcttggtgcagtccaggcaaagtgggagtcgccagctgtagcttccggaggtcccttttcagctgtccacttgcaccctacagagaggcctgctggctgagccaactttggatttatgctatgagtactttatccctttggttttcttcccacagttgcatgtctgcttctccaatctccccctcaggacatttaaagaacgcacctaagtcactgtcatcatccacactcttcagagggacttgtgcccaagacgctgggtgaccacgatgtcttgcttccctatttcccttcactaccaagtcctgatggtccacatggtctctactgcccctgagcagatgcgggattctcagtggggtgtgggccaaggaggtcagtcacctccctccaacactcactggcactagtcccaggattctgcacatcactagttctgccatccacaggtgggccatcagcagctgagtatgcatctcctagcgggcaacaggctctccatggctcttgagggctctgcagctctgcctccacttgccagtggcctgtgggccacaactgaccacttggaaccctgaggactgtctcctctccaacagaaacaagggcccaccaatcaggatagaccatctgtcgggctggactgtggggaggggaagcaccctgtgtttgaaaaaactgtgtccctgattttgtgttaatataaagtgacattacttatgcagtgccttgggggagtggaaaaagctcactgcagcccctacctcaggccactccaggccccaccgggtcctacagcgcagctagagggtcaaagcagaagcatgccacagcccggggtccacacatgatcctctcagggcagcatgctgacccgtccctgctgaggctcatgaccctgatttcaagtcttcttctgctgcagggaagcctggtcctgcctgtaaagagtctatctaccttgctagattgagcttcttgaagaagggactatgttttcttcatctccgcatccccggtagctaaccaatgtccagtatacagtagggcgtcagtcactgtcttattttcttgttgactctactctgacttatgacatgacactttcccctcttgacctctctctatttttttttttttttctgagatggatttttgctcttgttgcccaggctggagtgcagtggtgtgacctcagctcaatgcagcctcagcctcccgggttcaagccattctcctgcctcagcctcccgagtagctgggactacaggcacgcaccactatgcccagctaattttcgtatttttagtagagactgggtttcactattttggccaggatggccttgatctcttaaccttgtgacctctagctttaaaacccctccgatatagacagaactcaaactggagccggacctgaggaatggtgaatggagcattttccctggtgtgacggagaggacctacagatctggctatcttgtcccttgcatccctctgcagaatttgaccccagttttcaaatcagactcaagaatgatctttagtgtttatgattttgtgtttttcttttctttttttttttgctttgttattgacacagcttctggaaatctttttcacagagagtatggggactttttggccaaattgggcagatgcaggctccatctgctccaccaccactgtctgggccacagcatgtcccctgcgtcctgctcctctacaggggtttctgcagtggaatctgctccctcacaagcccatctacaaggtgctcctgtgctccaaccctgctgtttccaagaaggcaggtcctgggactgccaggatccctctccctcagacagcgcaatctgtgtaggcagcaggccggaagtggtgacagccaccatgacagtcagggccgagggcaggacgatcacattagaaaacagcatccggcctccaggggcgagcggagtgactcggcctccatctcccccttgaggcagccatcttggcgccgctttcctcaggagcactgcgagctcgtccttaggacccgcttctcggcttttcttctcccaactctttttaccaggcagtggcgtggcctctctggcccagcagggaatgggcgcagggaagggagtggtagtaacgagcgaggcatagaggcttttctgtaacagcagttatgttaccctgattaatacaaaattgcctccacgaatcacaaaattacccaagcaaaaaataaggtctaggttttaagaaactaactcctgaaagaattgactcgtcctgggacaatgtacagagttgatgtctggttaattagaggtcactgggatagaattcttcctgatatagcgcggcataaaggtgtgtattaaggactctaggtaaagaatcacgtggagagaatcttcaggtttaacacaaagatcccagtttttcaacaaaagggaggtaaactactcagatggggtctaagttgtagcccaatgtcacagcctgctcctgccacaatttcttattgatgccaggagactgcctttgtttactgcagtcatcatggctgttgggaagtgttaataacttgctttttattttaagcgggtgtgaattgcatgggttctgtttcctaataagagtagtgtcacctgatattttcacataaagagagctgcctcgtggcatgtcttctgaagctagcatgtgcttatccttcacaagcccacaaaaactgcagactgtaattcagaaatttgatttgatcattccactaaacctctaagcccaatgttttcttcagctcagtgttttccttgccataaacttaccctcagagggaaccactgacattttaagagctgaatccttacagacactgaggccaaaaggacttcagtgccaactctgcattttgaggccattaaaaaaaatatcatcaaagactggggttgccaatcagaggttctccatagtgagtgtccaacaataagatcatagtgactgcttattccaaaccaaagttaccacattcgatactcaaggttttcaacagaattgattccaattagagcttcacattttccattaagctgtatgaaatattataaatctattgagaacaccagtagaagaatggctaactaaatcgcagtatactggcacaagggaatactatactgcaatgagaatgaacaatcttcaattatacctgaccacatgtatgaatttcacaaacacaatatggggcacaagaaggcagacaagagagtatacaatgtgtgagtctcattatataaagctcaaaagcagaccaaattaatctattgtgttagaagccagaatgatgattaggtggagtacttactagaggaaggtataagggaacttgtggagaactcgtcatgttctgatttcagacttggtctctagttccccaagtgtgttcagcctgtaaaaaatttattaagctgtacactacctcctactgcacttttctaaatatgttatacttaaataaaatgtttacttaaaagccaataaaaaatcttaaggacccctggagagatacctcaaagtttaatgatcccaggtaatgaatcactacctcatatacttttgaaaaaatttatttttgcattttgtcatacattgccaattagagtctgtattagtcagctctaacactgctataaaaaaatacctgagtctgggtaatttaaaagaaaagaggcttaactggctcatggtcccacaggctgtacaggaagcatggcagtatctgctcagtttctggggaggcctcggagaacttacaatcatggtggaagacgaagggggagccagtacttcacatggctggagcaggaggaaggggtgtgggggaaggtgctacacacctctaaacaaccagatctcttgagcagtcactcactgtcatgagagcagcaccaggaggatggtgctaaaccattcatgaaggttcatgaagattacctccatgatcccattacctcccacaaagccccatcaccagtattggggattacggttcgacatgagatttggtcaaagacacagatccaaaccatatcagggtaaatcaggttaaaagagttttacaaatgtgagatttggaaagatgtatttatgattggattctgtttcccccttttcccccacgtctttcaatttttgattataaggaaacatacatgttttaaagtggtggctaagattcaggtgtggcctgtgctcttggcaaaagccaaatttcaacaaacttaaagatctaattggctttttcatgccttggggggcatctcatctaaagagttagaaaaggctctctgatgacctgagcaggagttggctttataggcaaaaaggggctgaagaaagcagaaacagggaacaaaaagcagattagttagcatcaggttacttcacattactctttttgaaagagttaaagtcgaggggacttccttatcatgctggctaaaactggccttttggggagtttggctactagccatccctctcctgatttcttggaaagtcagataataacacttagttttattatctaagtaatagagtaatggtaatggagaacttgaacatgactgactccatttcggtttggtctgttggagcctaatgtaggagctcagtccaaatcaatggcctcttatagattttatgtaacactccatagataatctatggacataaaaccagaccttgcttgacagtgttaagcagtcatggctattatgtgcttaagagtcagtatagcccttaaaaagttacctccatcacctcaatgggaatgaagcgcaacaaagatttgtccctcattgcttccattatgcttctctcaactcattgcttccattatgcttctctttttgattctgtcctaatgacacaaataagtcctaaccaatatgtatccatctaacattgctaagctgtgttgtttcaccaccaccaccagcatctccaccatcaccctcaaatggttagagtaatattcacttgctattgtgactgtatttcttgttattattgctgatattattgctacataacagattacaccaaaacttagcagcttttattattttatcttgttcttggtcttgtgggttaggaattcagaaacagcccagctgagcagttgtctcttggaatctctcatgcagttgcaatcagatgttggctggactgcagtcatctgaaggactggacacgcaagatggctcactcaagtgcctagcaggaggtgcaggctgtcagtggacttagctagggctgatgactggggcatctacatgtaattccccagcatgttgatgtcagggcagtcagttttcttatatggttaacctctaacttccccatagcgagtgttccctgagaacccaggggaactgactttgccttagaaatcatacagcattgcttctgttgcattcggttaattataaatgagtcacaaacccaagcaaattcaaggggaggcgattataccccacctctaaatgggaataatatcaaaggattttcagccatttttttaaaaccaccaccctgtgtgaccagggcaataaccaaattaaatttagttgattgtttttctcatgctgatgtcctttggttcttcacccagaatgttgtgtgcagtcatagaaatgcaaatcaattaatccagttgctgcattaggtatattatcaaagaagccacaagatgtttccatttaacgaacacagatttttatagggcttgctcctccaattctgtgggaaagaactttttattcacctgttccatttgaagaaatggaaacctagaagggctcacagtttcctatctcttaagttgcagggccaaaatttaaacatattttctgactctaagtccaagatttacaaatacatctctgatagtttcaagtttaaatgagcttcattcatttcagtaacatattttgcaccaagcacctggatgttttcaagatgagtatatcttacatcctagcattatatcctgggatattctgatctatttgtttaagctaggaattgtgctagcgccaatggattgaagtatctgctgctcttctgatcaaagaaatggaataaacaattttaggaactttaacagaaccatgcacccaagaggaaggacattttattctgggtgcagaatatctttatcaattgcctggctgaaagaactggggattaataaggattagaatggcaagcaaaatgaagatagatggagttgctaagggatcaagggactagactagaattcaatatgatcctgggtaaattaaaaagacagcttgttagaaatgaggaaaaaaaatcagtaggaacaaatgcaaggtggctcatcccaacaaaaatccacattgcttcaaaggtgggtaagactggctagatataaccataatagacactcgccccagagccagtgagtaccatgtgatggatgagagtcagcaatattaatttcaggtgtgggagttcatgggcaagacaagaagactttagctcaataaatggggaatttctctaaccccaccctcaaagtaaatcaactcttcttgcaatacataatcaaaactcctttatcttttatttcatggactttattactgttgtaatttttaacattttgatgtaattatgtgattaatatcgtcttttcactagatggtcagttctatgaaagcagggtctggatctgtttgcatcacgcatgcaatgcctgccatgcagtgccttccatgcgcctaatgtgcagctggtgttttctcaatggttactgaatgagtaaattaatattaggctaaaaataatgtatactagtgcttggcaaacgatggcccactaaccaaatttggcccataacctgtttttgtatggcctgtaaactaagaatggttttatatttttaatggttgaagaaatcagaagaatattttgtgatgtgaaaattatatgaaattcaagtttcagggtctataaagaaatgtttattggaacacatcccacatttgtacctattgcctatggctgctctcgtgctaaaacagcagcactgtgtagttgcaacagagaccacgtggctcacaaaatctaaaatatttactctctagccctttacagaaaaagtttgctggcccctggtatagacaatctggttctcatcatccttggggttttgtcaactcatgggcatgtattcctaagcttttggctgatatctaatggataaagtgacttttgtgccctctctccccccattgaaacaaaataaccactctcttgttttctaaaagactgaaggttataaaataagaaactgctcaggtctccagaatggcggcaacaattatcgaatgaataaattaatattgagatgagaataatgtagactagggattggcaagactaggagctctggaggcatatggaattggtttcaaatcttaattctgccacccaaatgtgtaatcttaatcaaaataattctctaagccccaactaacctttttgtaaaatcctcataggaagctgtggtggttaaattaggtatgatagataccttttagatgagtttgcccatccaaagtcctttctctgagaactgttcccccacttccaacaccaggagcaacctgtacagccctttctaccttctctcctctgaccacaatggataggacaaagcatgaacaaatgatgcaaagtttgtcttaggccaactagatgttttccctcaaaaatttgaaaatgaaacatagaaattctagttagtccacttgaggcacctggactagaaccacttgtttgggcaacaagcaaggatagaagcaactggtttgcagacagagaaaaatgaacacaaaatgaggaagatatttgtgtagagaatgaaagtagccccgctctgttgggatgggaacccttctgaacctgttatgaatggcagcaggcattttcaactcacgggtaaaggtctaagttcattaagtcctgccgttggagcccagcccacctccgtctccaagctgcttatacaattcagcccctcaagcatccatatctccctatggataagctacagaaacaggggtgattaaaggtgacttgcattccattatttgtgctaaacatttggtgcagacttctttgttctgaattctttagcatcagagggaaaagactggaaaagagaacaactacacacagaggtgggtgatcccattccataaaaccaaaactttggaacttgaacatcaaatctttcaagtctcaggtatgacgtcctagcaacatattgttaaaaattcagcttcagatccaaactgccatagcagtttcctgattgcctactctcagaagactgagttccttctgcagctgcatagaaattggatatacacagagatttataagagaacagcagtaaaggggccagagatttctcttgctacagatttttcagggaaacacatggcagtttggggaagtccctaatgctaatgactttccacttcctagtttcattcccttggtggcagcctggctacttttttgtccttggttcagggagatagtcatgcacaaaatcctgttttaaaactagctccaatggagttcagtctattctcacaaacatgcctggactgaaataatgaatttcctggtgcatacttgtcattcaacaatgtaatgattgtcaatatttttcaaagtattattagttggcattattattatggaataatgaaatattgccatggaatatacagtgaaaaccaatgaccatagtttttatagattcagactgcagtgtgcaggcataaaatgacatggtgtctgggatttgcttcagaacaattccatgataaaactttctttttgttttgttttgttttgttttgtttgtgtgtgtgtgtttccatgataaaaatttaaaaacagaaaaagaaaatgagaaagaaagaaatagatagagcaattttggtaaactcttggtaattgttgagtctgggtgatgggtatatgggaattcattgtattattcattctgctttgtgtatattagaatattttcataagaaaaattagattaagattatttttagagttaaaataattagattttaaatatagtaagttgcttacataaaagctctaaaaagtcagttcatcattacagtttgcaaagaatattttagaactatttattctttcaaaatagaaagaaacctctcttggatgacgtagagtggccctgagatagggaaatggactaaatgacattgtaagacaccctccgcacacacacatacttgtcacctctactattcttcattaatgcatttcttcctaaacaaatggtaaagcattcttccaaagaatatttagaaaaccatcaataatccatatgtgtcaaagattgcaatatgtctttaaatctcagaaggagagggaaatcacattatagatttcttctttttccaatacatcatgctaatgacaacgaattattgggtgctctttattctcatgggatgaatcaggccaagggttctgttctctgtggctggtaaatcagaccctggaaactgtgtcatcctggctggcctctttccctaagtacatgcaaccagccgcccgctagttctgggctaatgaagtccaattgctccataggctgaggtttattcagtttgtataaatgggagaaataaagaccaaatatggcctggcctaagtaagacataacagtttgaagcacagaactgagccaagaaagggaagcataggaagaaaggggcataaaacaaaggccccaacatgctctctgctctagaggcagccagagaaggagctgctcagtccatccctgagaaaaagaggctacccaaggttggcagagagggtgtgctgatgatggaaggagaaactttgatgcctccttggtccttttattccaccacctcatgaccatagcctgaaactcgtaactcctgcccatgcaggttggagaattgagaagaaattctacttgaagaaaaggtggtacctgggggcaagtgaacagaactggatgactgaacattaccctaaagaaaggaacaaggcagcacctagcacagaacctggcacataggaggttctccataaatttattcattcattagaaaaaaaatggagtgggtgcctactatgtgctctgtactaggaaattcaaccctgaaggaaataaatataaagttcttggcctcttggaacacagagtctgttgagaggattggtagttatgcagataaacgtataatcgctaagtctgataatcagaaaaacactgatctggaggggttatgggagtctttaagtgttttgtgctcaaaggcacccaatgtcagaataacatgattaactaggagtccaagctccagaaagagtcttcctggattcaaattccagttctatcattccctttctgggtgaccctaggctggttacttaacctctctgtttttctgaaaaacaatcatgttaataataaagtgaatgtgagatccagcctcagcccagaataggaacctgatctctaatggctctgccacctggccctcttgccctctgacttctggttcgatttgaccaatggaaagcatgttcaagagattagaaggctgtggtttggcaattaccaatttcttctgtctcctggccctcccctagaactctcactaactttgaaacccaccccctctagaaaagtgtctggtaaaggcaaaaagctctttgctgttgctagaacagcaacataccctgttggtttcttataatagtcccttcactaaacacccttcaactactctttttaaatgtaccatgtgctttccactgaggccctgaccagggcgcctaaaaataattcttggcccttgataaacacctgataaagagaagctaatattatccaagtaagacactgtttgagatttgtgttatgttatagacagtgtctatgacaccccctatcattgaaaacatgttgagaggagatagtctaactcttcccaaactccctagaagcccatcaaaagaggataataaaataaggacccagcaaaacactaacataaagtggccattcatgggtgaagcaataataattctggtcaccagcagcccttgcctgtgtgcaaaagttatgatgccgttataaaaaataaaaacactgtcggccctttgacaatgatgtgaaaggggagattttccagcaaaagaatctcagccaaatttgaagctgttatttacccgcttaagacagaaagtatcctctctgggttcctcgtgatctaatcctttaagccttctgctggcactggaaacaatgttaagctttgggatcaggccctttggtttctataatccatgggaatttgaagatgataaatttgtggagagcctgaaagttcctaacatttaatggaacccaagggggaaacaattaggatacagtcacgtaactccattaactcttctggaaggctctgaattatgtaagtcccctgctgcagctttcctcccctgcagccccattttgccatgcaacaaggaaaaaggcagaggcaatgaaagcaaatgaaaaaaaggaaagatctttccaatatgactatttatttgcattttctatgagaagtctggtggggaaagaattcaaactgacaacacaaatgaggggcaggaatcaacattagactgaacttactcaggctctctgagccacccccaacccttgaccatcctttccaaggataactgacaactacacacaacaaagaacacatcgaacctattctcattaataggatttgtgggggcaagatagtcctaatttatgctggcgtgggctgaactattgaaaataaaaggatgaacaagaagtttctttcatttcagctgtaactgtcactataaataggacatctacaaagagactggacttttgtgggctgtttgagcaatgcctgtgaaaggttgtaacaaaacctcaaaaaataaattcttatttctctgtttgtcggaggcactaacctagatttgccatcacacctgtgccaagaagagagcctgcaccactgcctctgtgtgggtaccactgaggggttggtagcagggagtatcagctggtgtcagaaaagagggacacctcctacacttggttcatgctgtgtgctgcttactctcttcttctctcacctacagtctcataagacattatccgactcattttcattccagtagacttggtagaagaagtctatggggaagccagacaaaaaagataattgaaagccatctgtgaatttcaagcacaaatagctctaaacaataactggcacaaagtatgggcttagtaaatgtttgtccgactcaactgaagtcagtgtgcaagtttttgttgtggagcagacatgccttggtctcaaggcatgctcgtgcacctgcaggtttgccatacttgagataaccaacatccaggtgggcttttaagccatgaggagaatggacctagccataagcaaatgtgggacaggtaaattcaggtaggtggcacaatctgaagaattgtcgggactgttctatttccaggctcttgcaattctactattagtggatcacttctgggagcaaatgttgccttcccaaaataattcatctggggagcaatttccataagatctcatatttttaggcatttaggacttttctgtttgttttcatattctttaatatgcttaattctcaaattgtttgttttcatctagatggaatctttactggtaaccactgtacaggtgaggaaattgccatcttgactttgagggaaatgctttttagaaatttgactcaggtgttccaggacaggtagtgtgtagggtgctgatctattttgcagaacaagttctctcactggagaggtagatttgtgggaagcctcagacctcttgggttgggaactgaaagcagaatctatctaaatctccaaaaaactttgcactctgcatatggttcattatgaataatttagtaaagtattcttaaattcaaaacagaacctgcaccccaaaatgatggatggatcttaagaacacttgatgaaggcaatgtctgcacactctgacagaaatgctttcaatgcagctttcttttcaatcacttggcagcaaatgtccatgtttgcaatctcatcagggagactaacacttgtgtctcctgctgatcatgccattgtgcagacagacttcatcaacaggcttgattgaacgttctgattggaaattttcctagaaagtttctgtgcagaacatgtggatactgccttgctttcaaaacatttgtctacacataggcagaaaccagtgggcttagaaggaagaattgaaagaattgttgccaagcctacgttcttgaagtaatgcagcataactacaggagacagcccttaagtatactgaagaggcatttcttaagtgtgctaaagaagcagatcttgtccaagatattccttgggcaacatctgctcagtaagaattcatcttttgatccgttccttcaaggattctttacttcatctcatttcttggcttctattttggcttgacctgaaatagtggtttcctctgttaacattacatcttcagcttcctccacctaggcctgcttccccattgccctctttctaacactggggatccaaaaagagttctcaatgtctctctgaaatttcctgatggagaacatgatactttacaaagaaagcagcacagagttaggaaaatactgctcagaaagcttttgtttcttgactgcatcagttatttattctgcaaaacaaccatcccaatttagtggcttaaaatggcacccattttagctcatgattttatgaactggcagttaggcttggctcaactgggtgattcttctggtttctactgggttggctcagagatctacagacttgtgcttatcaactggaaaatcatgtataagggggtctagctagtctaagatgctctcactcaaatatctcatggttggctcactgttacctgggatgatgagggtgaatgaaccacgtgtttctcattcttccacaggataatctggacttttatgtatggcagcttaaaacaattctgagaggatagaagcatataagtgctcttgaagctctattcaaaactagtatgtaaattccacctcattctataggccaaagaaagtcaaaaggccaacccagaatcaagacttggggaattagatgtcttgatgggagttgctgcaatggaaggtggttacagagatgagtgaagaattgaggacatgtttacatgactcagaggaagtttattgactagagaacagaacctacttacctaaatacagacttatttcctgaccccatgcacctcattctttgccctttgaaactccaagagaagttcaaagaagtcaggggacttaacacaattccatctgaatgaattagcaaaatatgggtcagagataactgtgtttttccaaaaggtggagtttatcattaatgatctcacagagcatggagagctgtagattatgccatacaagactaaacaaaacccctgatctagctatcacaaagccttggcatataaggactttttcactttagtcacaaaatatgcttcatctagcacttgtccttactaactaagcctttcagcattgtaggctttttgatcctattgtattctggatccctgcccttcagggtcagctctgggatgcccagatgtttaatcaaactcaatatatgagggctatcaaccagtctaaatagagaggcagatggaacaaagacagattagggaggcttgttgaaatttggctttgtttttttttgcccttcacagtacaattgtgttctcaagactaatgaatgatattttccacaatcatctagactgaaggaggcagagaggagtataatcaacttctgtattatcctcagctattccagtgactgcttctccaacatactgattcagatgggcctggctcttccacataaggaccagaactctgtacatacggtctccaaaatagcatcctttatccatcctccattcactctccctatactgacagttctgtgactgcttacttcatttctacagggtttgcctgtctggacaaagaatatctgactgaggcccccagtttgcttttggttatgaatggtgctacatctaattcttttccacatactgtctcctgtcagatgaaagggaataatcagacaacagaaaatgtctcacaattacaagacatcaacctctattacttatagtttctgtaaagtaactgtcatcccatttctaagcagaatatcccctcactctagtgggggttttacctctaatcacctcatcctacgggtttttcctcatgccagcctcaattgctaccctttttgaaaggtgctcagccaagctttgtttgattgattgattgattttttaaattttttgttttgagacagagtctcactctgacacgtaggctggagtgcagaggcacgatctcggctcactcaactctgcctcccaggttcaagcaattcccatgcctcagcctcccaagtagctgggattacaggcactagccagcacacccggctaatttttgtatttttcgtagagacgaggtttcaccatgttggccaggctggtcttgaactcctgacctcaggtgatccacccatcttggcctcccaaagtactgggattacaggcgtaaaccaatgcacccggctcaagctttgttttaaaatgtaggttttataatgatttagatatggtgagaccaacagataggagacagctgccgttgaaaagatagtttattactcacagttctcaagagggagcagctgtgcccttcagcgccacaccaggagaagcagccgggtccatcaggaggcagagggagcaaggggaaagtgtgggtgagagcctttcttgtggtttccatgggaagaaacaggcaaggcagggtaaacaggcttagggtttgctagtttgaatgatctcagtgggctctgaagggcccaggctgtcctgagttgtctgggatctggtcctggaatgatgagggcaagggaatattggcctggagtggaagagctaagggaggtagttggggttatgagctttggactggttggtctgcatatgagaggcatactctagttattttttctgtctaaagatgtgctaatcctaggaggggcagtctctccctggtcagcaaagccagagcatcattaatatagattccagccccttctaataggccattttcagaatgaaggggctactcactgtcgatggcccctagtgagtccttgcacatcggataccagatactcttaagacttggggacccttcctcacaatatgcagagtcagatgtagcttcccagctccacctccctctgtccttccctttggcttctctgtgctttgtttcaaatggcctgcacccaggactctatttctacaactgcctttgggctaccagagctgctctgcccacttaccctgagagctgtaagttcctagagggctatgcattcacccctctcctgggtccctgtgtccattagcctaagactggcttatataaaatacaaaagtccagctcctttccctccagtggggacaaactctgaggcatgtgtagcttatgttcctaagctcccctgtggggtcagggtcaggctgaggctgaggccacacctgaaatcatagcttccactggcttcttctccttccttttcatgcctgcctgtcccaactccttttgtggtttctcctaggcacatttcttttgaaaaaatatcactacacataaatccctatctcaggatctgcttctagggaacctgacctaagataaagaggaaaccagatgaatttatctgaaccatggtagactcttagtgcatctatcaccatctgcaatacaagttagtgtgaatcagctttttatatcatctgcctaggaaaattggtttcctagatgggtcttgtggtgtttgatctcttggggaaacatcctactgagagtcacaggggtccctcattatcctattcccccagatcatagcttattgcacccatcctgacccaaagtagcccactggttgacatttcagcagcctgtgtggccaagcctgataatatagtggaccaatgagatgctatattagtctgttttcacactgctgataaagacataccaagactgggtaattcataaaggaaagagatttaattgactcacagttccacctggctggcgaggactcacaatcatggtggaagatgaaggaagaatggcagctggtgatgagagaatgagaggcaagtgaaagaggaaaccccttataaaaccatcaaatctcatgagtcttatttactaccatgagaacggtatgggggaaactgccatcatgattcaattatctcccattaggtccctcccacaacacatgggaattatgagagctataattcaagatgatatttgagtgggaacacagccaaagcacatcagatacatttcttgggattctgaatttgtcaaacagagggactaaagctgttaacagcagggtaggcactgagtgaactaatcccacatttccttgatgaataaacccagggatatcatcatgagtgtccagtggagcccattttattgactacacatcacgtaatgtttttgcttccatccttcctgagtgcataacatatagaaaaagtgcaatcaaaattgcctttctgcaatcctctcacaaaacaatctagacgaccctctgccctttcctgttttcctggctacattatcttttactgtgagaaagactttgaacatcgctttgggggatattaacatgtccaaagtgtgctttgttttaagaaaatgttagggcagcttgacagacattgagagacatgaaactaagggagaacaaaatacaaattccagtacttaatagtaaaatagcataaactgggctccacctttggagaagagggactgcaggctagggggcagaagatgctcccagcaatgactccccttgtacagacctgtcttttgtttctttgctcctgcagggcagagagaaacccctgggaaggagaatagggcaaggtggatggagtgctctcattttgtgttttgacctttcagttcttccctttccctcagggtttgaaaggtactttgtgggtggtagactctaaagcctaagattttactcatttgaaatactagatacaagaatattttccctagtgtccttgtccatttaggctgctataacaaaatatcatagatggggtggcttataaacaatagaaatttatttctcactgttctggaggctaggaagttcaagatcaaggcactggcagatttggtgtctggtgaggtcccacttcctggttcatagacactgtcttttggctataatcttgcatggcagaagggacaagggatccctctggggtctccttgataagggaactaatcccattataacagctatgtcctcataacctaatcactcatgaaaggccctgcctcctaacaccatcaacctgtggggtgttcgaatttcaatataagaatttggcagggatgtatacattcagtcctttgcacctacttacacccattctgggtctaatcaaataacttattagtacaacagctgcatgctctatgccatggtcccttaatccatccctgacttatccacagctgtgatggggacagttcctgatggctccatcagctccccacctgaagtacctgcttctttccttttcactgcaagaagtctttctccagagcctcgaaagtgttctcaggctacctgtgatatggccaggaagttgaggatttaatgccaccaggagtgaccctcagccaatgaaaatcagaagtcagtagataaaggcctcagtttcttcattgctcagggaacagatctaaagcatgttctacgcaataccatagagagtctccatagacgtgaatgccagttatagcagtaacctgctcattggcacaccttttattggattcacttcttttccttcttcttttcccaactccctcattagtgctttcctggaatcactcaaaaataaactacttgcacccaagttcttttctcaggatctgctaattaactaggacacttgtggttaagtggaaaaatctgacccttttctcaaagtccactgactttgtcctaagacaatgcactgagtacaagttgaaattaggatggaacaaaaatgctgagcccgagaaagccatttgatagcagagacagtaagagaagtccaagttgccacaaccactacagcctatatgatgccttttgcaaatttcaaaaatattttacttcctcaagacacttttcacctattgaaacattttctgatatagaacaaggcacattattgccatatgccaggaaattgtcataataactataaaaatgtacagtctctaagatgtgaaaggctaacccaaagtccctcactttcacaaccgtatatggtaactctgcctttacttggtttcagttacaattcttgttcctctaaggcccagccaggccatgattcctgcccttgaattctgttgagaaaccgcattgcgttctgcctgtccttaaacagagcttgaatgggtctctagcctttaaagaaacagtagaaagagtcctaagtcaattattacatgtaagtcaggacctccaggccagtggtgtaatcagtttctagctctaaaatttgttgaatagatactgatgaactccagttagaaaaccggtaggataacttagatcaaggtcagtgacaccaactaattatgtagcacacaattgttaatgtaaattaggtgtttaaatgtgtatttctttatttaaaaaaatatttaggtgtattagttaggtttgtctagtgataatgctccataacaaacaattccaaaatctcagtatcttaaggcaactaacatttattttactattacagctgtggtttggccattttcagctgggtttggctaggctagaccccaagttgacttcaagttcaggtctgctttatgttttttgttccaggatgtgggctgaaggaataacatctacccagaggaccctcttttcatagcagagggtggagaataaaaggccaagtcaggccaggtgcgtggctcacacctgtaatcctagcgctttgggaggctgaggcagcccgatcagttgaggtcaggagttcaagaccagcctggccaacatgttgaaacctcatctctacaacaacaacaactacaaccatatatatacacacacacacacacacacacacacacacacacacacacacacacacacatatagagctgggtgtggtggtagatgcctgtagtccaacctacttgggagactgaggcaggagaattgcttgaacccaggaggcggaggttgcagtgagccaagatggagccactgctccagcctgggtgacagagtaagactctgtctcaaaaaaaaaaagaaaaaagattaataaatacataaataaagggccaaggcaagcaagcaagtacatttagtcttcatgttcataggcttgatttactcattccacaatgtatacctgtttcaaaacagcatgttgtacaccacagatacatacaatttcttgtcaattaaaaataaataaataaaaattatatataaaaaagaagtctctgcttggacattgcccatgtcaggtctagtcacattccattgaccagagaatgtccttgggctgagtctcatctgagaagaagtgtatcagtgcctagcaaagtgggaggcactgcacaaacagcagagtgtgcatatgtaattctattcaatggggagtaaagaattggaaattatcacaaggtggaaattcttaaacataccctagacagaatgtcataataaactccaatgtaccctatcacacagctataaccatcacctcattattaatcttctttcactcccatataatttcgaagcaaattctggatattatgtcttttaaaggaagaaaatgaatctatatttttgaagatgagagtttatttagaccttaaagagtttacaaaacaatacaaaggatttactactaagtcaacttgatataaaataagacacaaatacatattcaataacgttaagaaacagtgggccgggcgcagtggctcacacctgtaatcccaacactttcggaggctgaggcaggtggataacttgaggtcaggagtccaagaccagcctggccaacatagggaaacctcatttctactggaaacacacacacacacacacacacacacacacacataaattagccaggtctggtggtgtgtgtctgtaatcccagctacttgggaggctgaggcaggagaatcacttgaacccaggaggtggaggttgcagtaagccatgatcgccccactgcactccagcctgggcaacagagcaagactccatctcaggaaaaaaaaaaaaaaagaaacagtcaattccaggatgctgtacatgggtgttttacgctgaatattgatgaattttatacttaacttcctggtctagctgaaataatgaatactaccaaagattaaaagtaaatgcccactgtttatctagttcattaatcttagtgacaaaagtaaaaaaataatttgcaataacagaattttaagatgcaagccaaagttactttggactaagctgtggagtagaattacatcgtttttggccaaagccttgctttctcaagacactttactttcatcttcggggacatcttaaaagacaaccacaaaataaacttcaagtgagttacaaatggcaaagaagagcaaaactttaaaaagtaccaaaataaaattgtcagagtgtggttaataaaaggaatcatcagatcaatctattatcatgtcacttttgactcatacttaaaataacatctcagtttatgaaatggccaatagaaatccattttcttttttttttttttttttttttttctgagacagagcctcactcttgttgcccaggctggagtgcagtggcgtgatctcggctcactgccacctccacctccggggttcaagtgattctccctcctcagtctcctgagtagctgggattacaggcatgcaccaccacactcggctaattttggtattttagtagagacaggatttcaccatgttggccaggctggtctccaactcctcgcctcaagtgatccacctgcctcggcctcccaaagtgctgggattacaggtgtgagccactgcgcctggccagaaatccatttttaaagtcatatgcatgatttctgtattaagttgttagggctgccataacaaaataccacagaatgtgtggcttaaacaacagaaacttattttctcacagttctggaggctaaaagttgagaccaggttgtcagcaggtttagtttcttttgaggcctctttcattggcctgcagatggttgccgtctccttgtgtcctcatatgactttttctctgttctcttgcatctctggtgtctctttttcttataagaacacgagtcatataaattagggcctcagtcttatgacctcatttaacccttattacctctttacattcatattgggggtgctagtgtcaacgtgcaaatttggtagagacacagttcggtccataacaattatatcaaccagtaagtattattacaagctcttaacaactgataccaatactaaaaatagctaattagctaacaacataactaatagttaacaggccataagatagcactgactatgtgctaggatcctttccatgtgctttacaaatattcactgctttaaaacttaaaacaatcctatcatgttggtattatcaattcccctgccttacagatgagaaaactgaggcttggagaagttaaagaagtaggccaggtgcaggccgggcacagtggctcactcctgtaatcccagccctttgggaggccgaggcggacggatcacgaggtcaggagttcaagaccagcctgaccaatatggtgaaactccatctctactaaaaatacaaaaattagctgggcatggtggcacatgcctgtagtcccagctactcaggaggctgaggcaggagaatcacttgaacccaggaggcagaggttgcagtgagccaagatttcaccactgcactccagcctgggtgacagagcaagactccatctcaaaaaaaaataaaaataaaaaagagtaggccaggtgcaatggatcacacctgtaatctcagcactttgggaggctgaggtgagcagatcacttgagtccaggagctcaagatcagcctaggcaacatggcaaaaccccacatctaccaaaaaatacaaaaattagctgggcgtggtggcatgcacctgtagtcccagctactcaggaggctgaggcaggagaatctattgagcccaggaggcagaggttgcagtgagctgagatggtgacactgcactccagcctgggtgacagagtgaaactcccatctcaaaaaaaaaaaaaaaaaaaacaagtagagatagagtagccagttaaattaggatgcccagttaaatttagatttcagatcaacaatgagtaagcttttagtatgtgtatattccaaatattgcatatgacatgtctatgctaaaaaagtagaagttgctgaaattcaaatttaactgagcatcctgaatttttactttctaagtcttataaccctaagttagagataagcttttttttaaattatactggagcagtgagttttaaattgctcaagagaccctggaattttcaagagctatattaggaaattgctgacagggcaaaagagaagataaacattgagattctccctttcaaatatagcatctcctttataatatctttttatatgttactgagatttgctatgaatattcacttgagaaaaatatttctttgactttaaaaaataaatgtgcaaacctactgtttttcaagtaaaattaacataacttctggatgttttgttttttgtttggggcattttttcccccaaaatggtacctttgtcttttccaaatctgatatattctaactttctgtctccgtaaagaattccctaagactggctcatttgcttggaggaccctcaaagagaggtttgcaaactctggccaatggcctacaggcttactctgtttctgtaaataaaactgtattggcattgtccattaatttacatgttagctcttgctgtttacacattgcagggcagtgttgaatggttgtaacagagaccatgtggcccagaatgccaaaaaatattttctatattatttccaaaaaaaaaatctgtcaactcctaatccctatgtatctgcttctgattgctaaaagaatggcttagaaacaagttgtcacgaagaatttttttttttaagtttaaaagaggagatcaactgggcagatcgattttctatggtcacttttaactgctttatgtcacttggaaaaattgtcttataaaatagccaagttatccaaagtgttcttattgaagatagagtcacatgggttgttgctggtagtgatctttaattctggagagatgaaaaagacatgaagcttctactgagacaaagtctatcaatatttttctgcactgatgacgactcttttcaaaagtggaccttgaagcagaaacccgataatttcttccctgtttccacatcaccctcttgtcagttctcttaacaagttacagtggtctgcaatgttagaattccagacaaggcatttaaggccactggactcttataataatctacaagggtttaggttgataatcccaaaatcagccctggaaactttaatagaactgctgtgtctttgaagtcatatcttagcgacatcttagtcttccttcgtggaaagttgtccataaacacattatccacctcttgaccctggagaatcagttcattattgccgcctcattttgcattttaagcagttattttctgtagctcccagattcttcctgaatcaccaatagtcataattcttccagggccatgaaggactcaggagagtgaaaccacttagaaaaatgttcctctctgaaagttgaactctacatacttagtactataaaaatcacactgtcaatctagctggtacgcatatcagtaatattataatttcttgcatttttcttatttacactttcttgtgatgtggatcatgtatgattttttaaaatttagagtgtccaaaaaattaaaaacatattttaaaagaaagatgctataacataaagaaccacatgaaaaaacaggcgtacagtcatatcatagaaacgtcaacttttccatgattatcatggttcagattttttcccttgaaaccgaagagccacattaatagtatgtttcaaaaacatatttattataaatgacaagacaatctctttacatatttataatgtctacatcatttatatctatttatgataatagaaacatatttgtcctagtctcttctgcattgctgtaagagaatacctgaggctgagtaattcataaggaaaaaaggtttatttggctcctggttcttgcaggctgtacaagaagcatggcactggcatctgcatccagtgagaggcttatggtcatggtagaaggtgaagggggagcaaatgtgtcccgtggtgagagagggagcaagagagggagaaggatgccatgctcttttaaacaaccagcttccacgtgaactaatggagtgaaaattcacttattacctctgggaaagcaccaaaccattcatgagggatctgcttccatgacccaaatacctcgcaccaggcccgacctccaacacggaagaccaaatttcaacatgagatttggaaggcacgcatatccaaactatattaacattagaaaccacctccttaggaatgagacatccctttggtgcaaacaaggatcaatcagtcattttagagactttttgaatgtgtaaaaactgtttgggtggttagggaaggcaatgtgcactatcttatttgattgaggttatccacagtaacctcggcagtgtctggcgtttggtgattcatttgagactggtgttggtcctgagatgcctcttgacgatgaagcaagttgatgtatgtctagggcttaaagaataattggccaggcgcagtggctcacacctgtaatcccagcactttgggaggccgaggcgggcagatcacgaggtcaggagatcgagaccatcctggctaacatggtgaaatcccgtctctactaaaaaaaaaaaaaattagccaggcgtcgtggcaggcgcctgtagtcccagctactcaggaggctgaggcaggagaatggcgtgaggccgggaggcggagctcgcagtgagccgagatcgcgccactgcactccagcctgggcgacagagcgagactccgtctgaaaataaataaataaaataaagtaaaataaagaataatttcccctaaggacctcaataagaggcacctgaatttccaggtagaagctgggaagaagtcgtcccaggggatattgggaggctgagtgttttttcagacagaatgaaccttcactttctttctgtaacagtcatgacaagaaataattggcttgtgagaatcaacattgaagctggaaaaatgatggcatccgaacaagtagacacagccctagtcaaggcaataaactacactaaagacagaggagaaagactcaaagttgttctaacatgtgagtacctaggggtgctgcatgccgttgtgtggtttgtgtactgcatagttgtactcagccaaggaagtggatgaggccacagctttaacatgggctgctgtctgcccagaaggataatcttttccttattttatatctcatttcaggggttctccaacttctgaaatccatccagaaactccctgtatttgggtaacagtattataactttttgcaccagggcttttttgtttgtttgttaatattaattgatttttcttatgttctttatgaaagaataactcatccattaatgaaaccaaatgtgaacttagtgccttctgtgtagaaaaggctaggaatacatattgtgggagattcattacatcactggccttaatactacaccttctcatgttcccccttggctgtgtaactttctagtgtccatatgctctctcttggggtggccagtgtgacttgctttggccaatgggatattagcaaccatgacataacccgaggcttataaagttgcctgctcattgggacttgtttcactgttgcatcccagttattcacatcactccagctgacagccaaccaacaaacagccagacacgtgagcccaaccaagatcagaagaactgtcccactgagcatagtctaaattgctaacatgcaaatgcatggtaagcgctacttgtttatggcattgaggttttcttggttatttgttacacagctttattgtggcagtagataactgatactgatacacgtggtgaacatgacagataagctctctgttctcccaggcttacattttaatggggaaacaagataataaatgaacaaataaaggaacaaatgaactagaaaaaatagctggggtaagtgatatcacagaattacatcaaaacaggagaggggtggtagaattagttagggcctacacaatggctttacttttgatgctgaaggatgatcttaattagtttaagatctgaatgagaagagtcagccaggcaaagaccagtgaaagtaacaatctagacaaaaggactagctagtgccaaggtcctaaaaagggaatgaacttggagaattctagaaacagagaaagccactaggcttgtggtgtagggagtgaggcaaagaggagcagcacaagatcagatcagaaaggaagacaggataagatcagagaagaagacaggccagattacacaaggtttgtaagccaaacaaggagattagagtacccaccagagatggcctttatgtacacaccatagatggcctttgcattcccaccagagatggagtttgatgtcttttgtctcaggcctgggtcagagcacaaagcagcaataacagagaagcaaaagagacattgttggaagaaaacaatcccattcctggcttctgtaaatggaataggaggggacacagaggcagattcctggggatggaagaatgggaaggaggggaagagggaggagattcccctagactgggcagcaaagggaggtcagaaggtctgcccctccagaagaggccaaggcagagccttcaggagggacaggaactcctggggcacctgcaaggacacctaggataccttctctaggcactgcagccctggccttggcaggtgtactttgtctagaaattgcagggagcctccatggtctcagtttccaagcaccatggaaacttcccaagatgccattcattgtgactctggctcagacaatgggcatattagggaagccaatgtgcaccatcttatttgattgatattatccacagtaacctcagcaatggctggtgtttcgtgattcagcctgtgtggaataaggaagggagaggccttgccaaatatttctgtgcccgagacctcccctcctctgtagccagagttgccatgaccttgtagctgaggctggggctcagagccccaattctgactcaaaagagtgtccaggaacccaatgccatgaggctcaaggtcaagtaatttgatttttaagaaaattaagaaatgtgccctcttcatctcaaaaacactatgttgagtgaaagaaatcagacacttaaatgatattcaagaacaggaaaaactcacctatgatgataaaaatcagaacaatggtttcctctgagggttgaggcaggggccgagtgactggtaggggcatgaggaaacttcgggggtgatagaaatgtcattctcttgagccacatgaagctttcaggtcttgagctaaatgtcaccaccaaactgtacacttaagatttgtccatttcaccgtatgtaaattttgctgctataaagtattgacttgagtctcctgtggcaaggaaggaaggaaggaaggatggaaggaaggaaggaaagaaggatggaaggaagggagaaacagaggaatgaaggcaggaaaggagaaggaaataaaggtgcacgtgttgcagatcccaggctgtcacccattgcacactttccacctgttttttccacaaaataagcacctagtttgtgagaggttgtgccaagcatctagtctgtgccaagtggccagagagaaaaaatatgtaaacaaagggtaagcatacaaagctcagacctgggcagtattagttctatccaagggtgaaggagacaagctctcagaaagatttaaaggggagagaaagggtcatgagggctggagggatggggattctctgagatctgaattcaccttgcacttctttttctttttgagaaacagaccacagcaaggtaatcttacagcccaggactcagctgctgcaatctctgtgaaaggtacttatgactaatgctgatgccaccatgaagctcaggaaacaatttacagggacatgggctgttctgagaccccacagccatgaatcgcctaatcattctgacagatttctgcagatgctgtgctcaggtcactgagtttcccagttgtcagtggtgaactggagcggaggcagaaggaaactcttcagacacactgttcccttcaggaaacaagggacaaaagggctgccctgaggagacttgggaaagtgacatttcctcaggctcgaggacatcccgaggtgactttccaaaacactgggttaaattggcctgattgtttattttcctcagctcgctttagaaaaaaaaaaagtccatctgtcctttgatatcaataaaaagagcatttgagactattaaaaacactgatggagatttgtttgggagaacggaaaatcgtgccaccattgaaaatggcaacacacacaaccttccatatggccatttctctgcctcagtacttccaggctgaatttcttgtcagctccagcttctcgccattttgttctcagggaaaaaaactcaggaactatccattcccatgtatttaaatgaaaacttcccaagatgccattcatcttgagtctggaagcaaaatgtaaacatgtttcataaggagtattttgccgacaccctataatctggtttatgacactgctttgtcaagaggcaaaggtttattccctccttttcaaatgaattggagatgttctaagtcagtggttcttgaaatgtggtccctggaccagcagcaacagcatcaccagggaacttgttacaagtgcaaattctcagccaggggcagtgacacgcagcatagcaagaccctgtctcaaaaaaaaaaaaaagaaagaaagaaaagaaaatcctctgactgcagcctagacctacataatcaaaaaccctaggggtgtgcccagtaatctgtgttttagcaagttctctaatgcagttttgaagaaccaagaagctaggctctctcagttcaggattgaattcagcctcgattaaaaactttcaaaataacagtgacttaaacaaagcagaagttcatttctctaacacataaaagaagtccaaaggtagatgttcagggctagtatgaaggctccatggtgacagaggaaacctaagttttttctatttttctgctctgctatcctttgtgtatggttttttatttcaagctggcttcatggttcaaaatggctacaggagctccaaccattacttctctgttccaggcagaaagcagaagttgggggatagagcaagcaagtagggtctactcctgctgtttgtgtccctctgcaggaattttctcaacagtctcacctaacaattccatttatatttttggccacctatagctgttaagagaagcttagaaatacggtcttttatcttaaattaaaattgtcattactgataggtaactcactttctctgccaccatgattccagaccctcttccatataaataaacataattccaaatacaaagcgaggttaaactcttctatcccaaggaaatatcaaacatgagtatgactacatttttagtaattttatgaaagaatagtaaatgatatattgagaatctcataaatgatcttatttaaactttccatttcacaaatgaacaaactgtggcccagagagggagattttcatgtccgtaagagctggtgagaaacagaccggggtgctagaacctgaaggagctaggaataaatccaaagcttcctgaaatgtatgccaaagcagtcgtctcataggagactccatggacaaaaatctccatgatcaagtgttgtcagttaacattacaaagaacttggagcccattaagattaaattttttaaaaaaacaggctgttcttcatactcaacacacagactatttatcacttaaagtgagttcttagaacattaaaagtaaaatggttgtatcagaataaattttattgcaaattctcaggacttatttcagaactcctgaaacctactttgatgatttcaggttctgctcatgaaacagagacaaccatgtgtggtgcctgcattcttggcctgcggggagtggaaaggagacaaagagtaaaacacggtgggaaagaagaaaaagaggttaagaaaagcaaatgtgcctactccaggtaattttgacttagggaccctgattaacttacacactaattaaaccatttccagattttgtgcagtctgaaagcagcccattttccccaacaccaggtcgctcaagatgaccacaggaaggttgtcatcttcatgtctaaaagccagttgacactcaagggtgtcatttcacttcagtgaaatgagaagcttcacagatgtgtagactctgaaaaatctaactggaaaacaatacagggaaatagcaatactaggcatcaaagcagcaaaaaaactactcaattatctgatatggggattatcaatggaataaatgtggggtttgttgtttgttgttgggattgttgtgggttttgtttcattttttagggtctcacttttctccaccaattagatctgtgctgtgagccacacaggttttgagtacatgttttgggactttatatcggtcagactttgccatggtaacactgtgtaacgagcagccccaaaaatctcagtggtggtcaaaagcaaacctttatttctcattcatgggttttcagtttgttcaggctaaaagtaaaatacacagattcttcacctgtctttcattccatgctgaaggagcaattgactgcctgggacatacttttctcataacagaggcaagggtgaaaaacaccaagtcatcttgattatgcaatcccatttttaatgtaaacaatgtcatgtctgcttctatttcattgagcaaagcaagtcatataggcaagcccaacatcagtggggtgataaagcacactctccaatggaaggaggaggggagcatgatcatttgctgaacagtaatgcaagatagcacaagacttgtctggggtgagagagagatcaaagctgtggatcccacccagtcttcaaccaaagcaatgtggctttgacctgttttctgtcttggacttgaataatactttatttgaaagaagtgttaaattgtttattaaaaaaaaagacaagtttgaaaaccactgtttccaagtcgcttattttgccaataaagaatctggggtcaaagggtaaatgccttgctgattgtatctgtctcaggaccagggctatgagatttaaagtcaaccagatctggattttcaaacctagctctaccatgttttagcggagacactctggacatgttcactatcctttcatcatcacaggcaagggtctgtccagtgccctaagtcctagggctctccagttgctaaccacactgaagggatgaaatgtatgagtgggccctccactggtgtgatctgtaatcagaatgggaaagactctctttgctccaccatgtccgtgggatgagatggaaaagtgcaccattcctggtggtgatgcttctatttaaaatactgctaaactgagtttccttccttgctcttctctctccctttctttgacaaacctatgcatgactcgagtatacagctatctcccctagtggagcacaggctttttggaggataagggtcactctttccatgtttatttcttcccacgcctacacctcacacctcattccaactccacagcacaataaccatcctatcttcacagcagcagagattatgtaaatggttataaattaaataatatgttttcttctccatgaccctagtgtagcattttggagaagacatggcttcaggaatgatttcccagaaattttgaaggtccttaaaactaaagaagaaagtcctgtgatatctgcaaaggctcatttgcagaaactggcccagcccaagtgtacagaaacaaagaaatgctacagccagtcaaaaccatttggctcactggttcttatttcaaatcagcagaataaacaaactgcagtccaagtaggaactggttctgctgtcctcttcttttaagccaaggcacaatgtttgaatgtttcagaagtttctttctaatgggtttccttttattgtctgtgccagatggccaatggatcctaggctagtaaatcaatatgctcactttaaactctgacttcatttgtttagtactttcctggcatcacttgtgcatattataggaagaaaggtgtggctattgcattgttctataataaatccagctgtgttttacccatatttctactctaaacattatgacttctggttatgcacaagttgacaataagagcagggtgtatgtatacatacatcccccatccacccagcactcctggtaagtaaccaaatccatcctccaccctgaaattcaacaacctggtagttaaaaagaattctttgaggcacaatgaaagactcatgtccacactcttgttctaagaattcgtaagctgggatacattttacttttctacatccagctccctttttatatgtgcttttctaagaccaggacaattgatcaaactatttatcatgaaagagctcttctcactctacacatttcaatttcacaatataaaaaagaaagaggtaaaatcgccagggagtcttcaactcatattgtcactgaaagtgtggggattattcagacagactgccccaaactggacaacacagtgatgtcatccaagagagcctcatatctgaacagacttgtatttttaagtagtcaaggaaaaagcctaatcaataagaatgaacttcaaatatgtccaccatcagaaaagcaggagacatacaaatatccagaacataattctggaggtaagatggcagaagacaggagagcctgcataactgagccttctgctccagctggtgagggtcatctcttagctttccttacagattcaagatggtggactgagggtcaacctcgtaaggagaatcattttagaggagtgtttcactccatacttggccttcacattccagcccagacatccccttctttctgaagactttccctcctatgttggatctacgaaccttgcatatgttcctgttgcagtactaatcacatagcacagtcatttttcatgtatacgattgtctcttctactaggttctgatctccttgacagtaaggacaatgccaacctgcccaaagaacttagcaccatgcctattgcttagtataaaattctggggtgttcaagcagctcacatcacctagtgtcagtagatttctttttccttttgcaacagtgaaaaccgggaatcagcaactgtaatctcttctaaggatttagaatcaagaaaatatagacaaaattcatcaatggctgattctatggaactgaggtactagtttacttgcttcttcctagcctagcctaatctcaccctttccccaacccccctcccccatagccacaggtaacaggtaggctcacctgtcaatgttcatagctcattggactagcatggtcatttaacacacaagatagaaaaaatttgattatataattcaggattttgaatgaagaagcctataatttggtcatgcagcctcaagatgaaacagccatttatttttttatggccacaaaggttgaaggatgattatagagagaactgggatgataaagctgtcacatagagagaagcagaaaatcgtctggtccatgtgtctccagagaagtacagacagagagagagagatagagagagagaagggaatacccagagttttctttttctcaattcttgtccaataggaagctggttattctcatatcattgaattccatattactcccttccactatatattcaatatttattttagcttatttacatgggtcttagtttcccatacaaactaaattattcctaactaaggcattgtaaaagatagcattcaaccttgacctaatgtattcattattggtatatacccataaattggggcttgattaattatgttctgagcagtagaaattctccctgcaagggctgcttatgaataaacccttgattaaagatcatttattctgcatcatattgtttgcaatgtaaaggtcaccaattttttagtcaaactactctaggttataatcccagctgtgcttagttagtaactaagtcaattttagaaagttatataacctcactctgctttatttaaaaaaaaatgttacttctactatggaaaatttcaaaaatgcccagaagtagagagaataatataagaaaaacctagatatacatcacccatccataataattattagcataatctcaatgtaatcatgaaaaaaaaaatcaagcaagtgcaaattgagggagagtctacaaaagaaataatgagtgctcttcaaaagtgtcagggacacaaaagtcaggaaaggccaagggactgtcacagatcagagtagcccaaggggacatgagaagtaaacgcaacgtgggaggaccatgggttggattctgaaaaagaaaaatgacattcgtaggaagaaaaggtgaaattagataacatgtctaggtcagttaatagtgctaccttgttaatttcctggttttgattattgtaccatggttatgtaagacatcacattaggggaaactaggcagtgtgtatttgggccctctgtgcttaaaaaaagtacaacttctctgtaactctcaaagtgtttcaaagtttcaaaaaaaaagcttttaaaataatatttatcaacattctgccattcttgtttcatctactcctcctactctcttttttgtttcttttctcaagtatcttaaagcaaatcagacaggatataatttcaccatttgttctctgactgataaggactctgttttatagcttagtaacaggaccacacctaacaaaatgggcaacagttccttaatacctaatactcagtttatgttccattttaccaaatgtctcagcaatgtctactgatgggttttttggttaaatcagattttaaacaaaatccgatattgtagtttgatatgtcccttaagtctcttcatctataacagtttctgcccctcctcctttttttcatgccattctttttataaaagaaactgggtcatttttcctgtagaatttctcacattttgctctgatggttgtaagcttgtggttcagagttttattatatgagatggggacaataacactcatagctaagagaacttttataaggcttacttgagaaaatgtatgaaaataaaggtctagagtttagcaaatgttcatctccaggccctactcagcacttcatcctccaatcctttctgcaggcttgtaatgtatttggttttgaacagtcaccatttatttaacacaaagttatcagcagactcatttgcagagaacacccactaaggccagcagataagttttcacaaatgatatataataaagatctgattctagaaagagacaaataaaattgtatgcaacctctaaaagtgaccgtgtaaccccactactcaaggtgtggtctgtggacaagcagcagctcatcctctggaagcttgttagaaatgtagcatcttgggccccttcccagaagtgctgaatcagaatatgcatcttcacaagattttccaagatatttgggtacacattatagattgagaaacgctgatctttagagcactaaatgtgggttttagtttagaaattggggattcccttccttcaccccaggagagaagattctggtctcaaaccctggtagccttagaaaatcttgtctccctgccctcaatttctgtctctctacatttcattaaggagctggacagttgtacttctatgcgaaaagggcagcaggaagtgaatcacttctttcctttccttctccactgactctgtcagaggtgtttgaaccagagcaactccatcttgaatcagatctgggtaaaataaggctgacacttactgagctgcattcccagatggttaggcattctaagtcacaggatgagataggaagccagcacaagacataggtcttaaagaccttgctgatgaaaggttgcagtaaagaagccggctaaaacccaccaaagccaagatggccacgagagtgacctgtggttgtcctcactgctacactcccaccagcatcatgacagtttacaaatgccatggcaatgtcaggaagttaccctatatggtctaaaaagaagaggcatgagtaatccaccctttgtttagcataatcaagaaataaccataaaaatgggcaagaaccccctcttggggtgtggatccggacccttttccagtaacaactcctcagaaaaagtattgagaaagagataggatttcttagggtttcttaggcagcatttgggtaaatgatccatgtatttgcacattcctcagctatatatatacaaggaagggctttcaaaaatccttgaagataagctgccattttgcctgtaagttttactcacttccaagcttctgaaaccaaaaataaaattctaagcccctcaactgactgaatggacctccctctcagccaagggggattccagagaaacctgaaaaactaatgcaggccatgatgggaggggggattcagacatgcttcattgtaccctctcccttttggagttcagggacaattctccagctttaaccttaaaacagagcttaagactgacaaaacagattctcctttttttttttttttttttttttttttgaggcagggtctgctctattgcccaggctatggttcaatggcacaaccacagttcactgctgctttgacctcctgggttcaagcaatcctcctacttcagcctgccaagtagctgggaccatgggcatgtgccaccacaactggttaagttttaattttttgtagagacaggatctcactacaatgccagggctaactccttgggcttaagcaatcctccctccttggcctctcaaagtgtgtgagccactgcacctggccgaaacagactctatgtagcaataagagaccaaattccaacctgactctagtataacatcacaggacagataaagaaggaaatcaaaatgtgtttctttggcatattttaaaatagccttcaaagccaacttttgtgggggaaaatttgcatctgtaaagaatctccattaaaataaggagaactttccctttccagatccctcccagtcctaaagagattaactgagattctagctcctcttaaagatctaaataggaaacatttaccccatcaattgtctctaagggcagccacctatgagacttcatctacataataataacctcagtctccacaatcccttatcctttcctagacactctgttctatcgatttcaggtctctttagataataacttaattctttcaactaatgaattgccaatcagaactcccctcccttcaagttgtctccctccttcaagtcgtcccacctttctggaccaatgtatacctcacatgtatctattgataccttatgtctccctaaagcatataaaaccaagctgtaacccaaacatgttgggcacattttctcaggacctcatgagactgtgccttgggccacagttatcatatttggctcagattgagagtttggcttttttcattgacactatgaccacactatagaagggagacattcttgctttgggttaaagagatgcttccaaatgggacatctcaggtaaccttggagggtttgcagtgagcatgggccactgtggccccacaatgacagctgcctcccaggggaggagtggagtgtttccattacacttgagtgcatcagtccacaaacacttttgattttagagaaattcgatttttttgtaacatgcagtcatattaaacacatatgaggaattttcatcttgcctcagaatccatggtagaactggtatctgaacttaaagccagaccaatttaatggctctgggtattatggctaaaaaacaaacaaaaacaacaacaaaaaccaaataccaacagcagcaacaacaaatgcttttaattgtacaaagagaagaacacatctgagtgtttttaagtaagtcacagacactatatctttccacctataatcatttaaacatgtatctgtaacacattatttttaaaacataaccaaaataatagttttataccaaaaagaactcacaacaattcttagtaccagtaacaatatttagtaccagttcatgttcaacttccccagttttctcaaattattttctttttacagttggttcacaagttataagtcatgtattatataatggtccctatcttttttttttttttttagacagtttcgctccattgcccaggccggagtgcagtgatgccatctcagctcactgcaaattctgcctcccaggctcaagcaattttcatgcctcagcctcccaagtagctgggattacagacatgcaccaccacacccagctaatttttgcatttttagtagagacggggtttcaccatgttggccaggctggtctcgaactcctggcctcatgcaatctgcccaccttggcctcccaaaatgctggattacaggcatgagccaccacgcccagcccctatccatttttaaacgccatttatgtgttgaagaaataacacataaatttgccctgtagtatttccctaattctggatatggctgatgatttccttgtcatatgttgtgacatacttctctatttctgtatttctcataaatggttagttagatattatgtgattttaagttaatatcaggcaacacaatgttcttgtacttaggggctactatgaactgaaagtttgtatccccactaatccccatcaaattaatacgttgaaatcttaacccccaatgtggtgatattagatggtggggcctttgggaggtgtttgggtcatgaggacccagccctcatgaattgattagtgcctatataaaagagacaccaaagagttgcctcatcctctctctgctactttagggacacaaagaaaagtcagcagtcccagaagagggctcccaccagaatcctaacatgttagcactctgctctcagacttccaatatccagaaccatgagaaataaatttctgttgttcataagccactcagtttccagaaccatgagaaataaatttctgttgttcataagccacccagtaggtggtactttgttatagcagcccaaactaagacaagacaggggctgcctgggaaggatgcaaggaaatgagcatggctttgaggctccacagaacccactctgctcagctctgtaattaggctccacctgtcacttgaagtcaaccatgccatgatttctcactttatgcttctattcctcatagcaagtggtgagtacgcaagaggttaccatgaagatttgacatttgcaaagcactgatctagcatacagttggtactgtataaacgtttatttttcttttcctctcttagtctcacatttcttgatggttaactgaaatgactagagtgcatggcctaaaattcctctccagctaggaaatgccatgacctttgctagattttagcatcagggactgggtcagtcaaattggcatggaagaaaacccactgcttacactttctttccaatataagaggcttaaaagttattttgaattattttttcattctacaaatgttcacttgtccccaactgtgtgcagagacatccccctgggggcatacaaagataattgagacagttcttccactcagtcagctcacagtttgggagtcggggaggaaatgaacatacaagttaaagaaactatgttaggctgtgtgcagaggctcatgcttgtaatcccagcactttgggaggccgaggcaggtggactgcttgaggtcaggagttcgagaccatcctggccaacgtggcgaaaccctgtctctactaaaaatacaaaaattagccgggcatggtggcacacatgcctgtaatcccaactactctggaggctgaggcacaagaatggcttaaacccaggaggcagaggttgtagtgagccgagatcgagtcactgcattccagcctaggcgacagagtaagaccctgtctcaaaaacaaacaaacaaacaaaaacaaacaaacaaaaacgcacctccctcggacctctagtatagctttttttttttttttttgacagagtttcactctggttgcccaggctagagttcaatggcatgatctcgtcactgcaacctctgactcccaggttcaagctatcctccagcctcagactcccacatagctgagattacaggcacgcaccaccacgcctggctaattttgtatttttagtagatacaaggtttcactatgttggtcaggctggtctcaaactcatgacctcaaatgatccacccaccttggcctcccaaagtgctgggattacaggcatgagctaccgtgcccggtcgggaggtacgttctttagaagagcaatatagaaaacaaagacaacatcaacattcagcttgtgtttgagtaactcttctgtcagtgggggtgggtttgggctagtcatgaattattaggaaatactcaacagatagaaataagagattgggaccaaaggacactgtgtttgggacgaggccggcatactctcattgccaaccaggggagttcatgagaatgctgcctccaaggctagcttcatagaagacagcattgaaaaagttgggaatggacagttgggacagttgggatgggtgcaatgtatgatgatttggagagttagtcaaagtaaaaagttgagaatacaatgtaaaagaaaggaagaaatctatctctaaaagttctaagcaagcagagtaatgaatgtttcattttacacaattagcattttctaagcttcgcaaagatagcggagtcaggataaccaagttcagttacataaaaaagaaacatctgaccttgacaggcagtttcctatgtcaaggtcttaccatcaattttgtttatagattattgcttttcacacattgtacaataaacatacacctataagcacatacagtttatacacacccatacatatatacacatttatattagggatacttaatgttatattacacatgataatactaatagtgtgataaactattaagtatagtaaagccataagtctatgatatataagtactatatagcacatttgttaaagaagactggggtcctaaaattttttaaaattatgttttctacagttcttaaatcctctcaagcacagtattcaaaactattatagataacttgagacaacatcctgtgcatttgcacagaagcatcataatataattctatcactgactttccccgaatcagaaaagaaaaatcagaatttaaaaatgccatgaaataacaggacaatcatcttagtgacaaatggtggacctccaaacagctgcctgccctccttccatatgaatacactaaagaacccatctgaaattatttcttggtattaagaaaatacaagcaatgttcaaatatcaagagcttttaagaaaaagagagaattgcttattccatgatccatttcaatgcttgatacattttattgacacatcatttaaaaaggtataattggatgtgagataattttatcagaatgcaatggtatgtttaaccaagatccccctgtgacaatcatctagtaaataagtaacgtggattcatccattgagaaatacaacaccctacacctcaaccaatgggttggtgcccaagtagctaacacaaaaatcagatcactcgtactatggcccattcagaaaattaccaaaataactactacaaccctcatgaacatgaaatgaggacttgagtatacagttgctaaaagggtctgtggcttgttgtaactacgaatttaaatatttggaagccctctgtagtgacaccctacatccccgaatctcctatatcaggggtcaaaaaaatttcacataaagggcagatagtaaatattttcagctttgtgggccattcagtctcagttgatcacaactattcaagtcatagaaaatatgtaaatgaatgtgcatgattgtgttctaataaactttatttacaaagcacagggctggctggatttggcccatcggccatacttggttaaccactgcctatattttcctgactaattgaaatgaaatttcttctttaatatgcactttcacaaaagaagaataaaaggaaaaaagaagcaaaactcaataatgtaaatttgattcatttggggcaagtgggtaccttattaattatttttatattattttattgaggggatcatagaaacatgatttcaagtggactctagtttctaggagttagccacatgctgaaattgggattaaatgtaacattcattaatcttgagtttggtgggaagtatttccttctattcttttttttttttttactttaagttctgggatacatgtgcagaatgtgcaggttttttacataggtgtacatgtgccatggtggtttgctgcacctattaacccttcatctaggttttaagccccacatgcattaggtatttgcactaatgctttccctccccttgcccccaacccccgacaggccctggtgtgtgatgttcccctccctgtgttcatgagttctcattattcaactcccacttatgagtgagaacatttggtgtttggttttctgtttctgtgttagtttgctgagaatgatggcttctagcttcatccgtgtccctgcaaaggacataaactcattcttttttatggctacatttctttatattcttaacatttgcatcctattcacaactttggatttataacaccaaattgattttcttatgagttaatggaatgaaaatcatggtttcattgaatgcattttatagaatcagtgcgcgaaatgacaatttttcttggatatttggttctaaaatactggtcacctgcatagtgaattcttccctaatatcagcctgatacaatatgggaacacagatctctgattttacctcccattgcgattgtgaacaaactcttgcaaggctagaaccaccattatgcacaattatgatatggcatataatataaaggagctgcctcactttgcattttacacttgttttaaaagcccagtgaaggctgactcacttctgggtcaacaggtgagactgtcacatgctaggactaagtggtatccagtgtagaaccgcggttctcaagcaggggtggttttgccctccaggggacatttggccatgtttgccgaacattgtctatggatacctttttaaaaaattattattacactttaagttctagggtacatggatacttttgactatcacaactagggggatgctgttggcatctagtgggtggaggtcaggaatgctgctaaacatgctacaatgcacaggacagctctcacaacaaagcagtatctaaccccaaatgtcaattgagaaatgttgtccttaaccactcttgaacttagtcaccactgacccctgtcctgggccccaagcttcagagagctctagacctcctctaattatgtggctccccacggggcaagtagtctgtaggccaagaggacaggcccacccagagcccacatctgctcttgtagaccacatcgtgggtacacagaagcccagaaatcctgagcagggcttgtgtgggcctcttcctgcatctgtctttcctagggaagacctctctggtacccttatgcccaaaaagttacatgccagctggggagagggtatatgtacacaaagtccctcacagtagtgggaacgttagggatggagtggttctcaagctccatttgtaattttggccgaaccacacaattgtctgaagtgggcctgatcaatttatcctatggggggattacagccccagctcacttccccgcaggttttgggagcccccacatggtggccaacagtctcttcaagttccaaatgcccacgtgcttccacactgatgtgtgtatatgtgtgtattttatgggtgagaacagggttagcacatcatgtcagcccaaatattgtctcaatcccaattggattaatagcaatccagagttatcagataagactcaagtctgcagaaatccccagatatctaaaaaacacaggggattttcagtgcatcttgggcccaactgatctggctctgggcttctcctaaaatagttccggggatcctgttatgggtctaagttccagggcagatatttgcagaaaggaatccgaagacctagccatgggcccaattcccaagaccggtgttctgtttggccctgttctacataccactaaagagtcaacactctctatccctatgagagatgggcagtgggccactgtttattacttctagtttacattcaagcatgcacttgccagttatgaactggctagcctgcaggcatgccttgctgaaagcaacagaaatgttctgaaaacacgacttgcaacgaattgtcagtgggatcctatttaggtgcaagagggaagatcaatatctcgaatcaactacttgttgaatatcttgggcccctgtactaatttatctggtctagatttttttatataatgtttgtttaagcatggtacaatagggttgcacaaaggatatttaaaaaatacatttttaaatccccttagtgaacctagatatttagttacttgaagaaaagggtactaaatacatacaaacacatacacttagacaaatgcctttaattcagaggtaccgtctcttctaaagtaacattttccagctggaaatgccttttgagaccaccctgaattacattgtaaactatgaagtgtgatcaaaatggtcatttttgttattacaaagtagtctctgagattgagaggaaatccattctgtattaaaatcatcattaatctgcccaaatgatcttttaaaatataactcaaattatgtcctgccctagactgtgaccccttgtgatcctataagaggccagccatggcctatagaccaatatctttggcacacctgcaatccatgagcaacatctggaaataagccaatcatagagagctaaatatactgcatgattccacttatatgaggtatctaaaatagtaaattcatagaatcaaagagtggaatggctgttgccaggggctggggctgggggcaggggaaatggggagtaactaatgaatgggcataaagtttcagtcaagcaggatgaataagttctagacgaaatctgttgtacaacattgtatctagagtcaacagtaatgtattgcacacttagaaatttattaagagggtagttcttgttaaatattcttagcccatgaataagttctggaaatctgctggacaatattgtgcctatagataacaacactgtattgtacactgagagatgtagagatgtggatcttgtgttaactgttcttaccccaattaaaaaaatgttttaagctcaaaaaattaaaataaaaattctattctttgcaggcaatatggtctctgttatagctgctcaattctgctattgctctgaaaacagccacagataatatgtaaatagatgggtatggcaaacaaatctttgctcacacacacacagagaaaggtgagtgtgggatttagccagtgaactataatttgccaacccctggcctatgggatagagggtcctcaggtgggatccttcatcttattttcccatgacattctatgctggactatagccacaacagtcttcatgcaatgccaaccatgcccatctctttcaccagagtgtgtgtgtaatcttgctgatagagtcaatataacatcatgtggcaggaagtgaaaacaggaaaagttaataagaaaagtaaagaaaaataattagcaaggaagaaagtattttaacttgccgaagtgatcccaaactcaaaacgtttaaaaacatcttttaaatattccccccatcctccaactctttttcctactattaattcagaaatcagacattctttccagtaaagccttcttttgggttttacttcattgaacaccttcctaaaacttcagttctcaaatatcatggaaaagcttattctgagttatatgctgctgctatcacagaaaaaaaaaagagagagagagactaaaaagtaaaacaagaagaacatttaatggaaaatgaagggaggctgtggactttctgctgctgatgttatctttgcgatatatctgaagcccttcaatgtgtctaagtttcacctctgacctctcaagaaaaaaggcgatttcagttcctcccttgtctttatccttccattcacacagacaaaccaaaaatatattttagacaacttgtatttttagttcacttgaaggtactaattcacattgaataagaagtcatatttcagtttctacagttctattagaattaggaagaacgagaatgaggtaattgggtgaattattcatgtatgtgaccacagagtcactttcatacttgcactagctccataaataagtgtcacacatcaaaaatgttaaattgttgtgaattgctttactatttttcatttaaataaataattatcaatgttatcttcctgttggaaagtcacctcagcagtataagaaagggtcaaaaagattagtaataatacctggagctaattacaactctatgatttcccttttgataatactatctcatgttaaattacacattctacaaacttatgttatacagtgtcttcccatagtttcagttcaaaatgaataatagtgctccctgagcaacgactgtgaacagcagtttcgatccctcctttgatctggaacactgcacagattatcgagagggtttctatttctctgaatcaggcagacactttgataattcagttcccgatgttagtaccaacaattgcaacaaatactgaggcattcaatgtagagccttgagttagcaatacagttttaaaacaaagcagaaactttctgaaattagccataattataatgcactgattataatgtaattaagatagtataacaggctgaggagcaaggtagacatatttttgaatgttcatacatcacctatgtctgaaaaagcacatgggaaacaatttggagctcaatattattcaaaggcaggaatgaatgcatgcttgagtctctctaatcccatcatactagacttacacacaacaattacagaacaaataaggaaattccacacttcgaggcttatagaataaatataacttatctgttgtcttcaatagcagtaattcctggttccgggtccattaacctgtaggagtccagagattaagcacctctgacagctctttgtcttgcttatccattttggtctcatgttgtctttcattttgttctgaaaatcaaaattcttaaggggaaacttctgtagattgttcctcaatgacattacaacaattgagctttggttcaactggaatatgctcaacggcaaagctgagggaaccgcactgctatatataaacgtagcttaccttctgtgctttggatattggaacatattttttaatgagtaatatcctttttcttcattataactgggattttagttctaaggggaaatcacataaaaagtaggttaccatatatcgttgttcgtgcatactatataaaatcaacaatcttattcaatcttattctctaaatatgcaatcaaaatttttaaattttagtcttcaaaaatcagtttcttgatacaattttaattttatgtattaccatacgttttgtttttaggtgtgtctttttttttttttttttgagacagactcttgctctgttgcccaggctggagtgcagcagggcaatctcggctcactgcaagctccgcctcctgggttcacgccatcctcctgcctcagcctcccgagtagctgggactacaggcgcccaccaccacgcccgtctaattttttgtgtttttagtagagatggggtttcaccgtgttagccaggatggtcttgatctcctgacctcgtgatcagcccacctcggcctcccaaagtgctgggattacaggcgtgagccaccgcacccgaccatgtcttcttaacataggttgttaaattaattaatctgccaaagtgttaaaatctatgtggtctgcatttcaaaatcgacaattgattcctaattgtatgactgaccctaattgtatcagggagtgtctcaaagccctaaattcatttatttcctcttaatttaaatatatatacatatatttatatgtatatacacacatacatacatgaagcacagagtactttgaagacagagggatgtttgtaaaattcaagccacaaactgacacaatctaaagaaactacaatcatgtctatagatatgaagtacagtcatctcttggcatccacaagggattggtaccaaaattctcaaatgctcaagtcccttatataaaatggcatagaatttgcatatagcctacgcacatcctcccatatactttacatcatctctagattacttataatatctaatacaatgtaaatgctatataaatagttattaaactgtattttttgaatttatcttagtttgattgacttttttctcccaaacattttccatccacagttggttgaatctgaggatacagaacccgtaaatacgagggccaactgtatacccagtctcagatttgctattttaaaacttctttttacaagtgtcagattatataaacacttggcctgtattcttcaaaaatatcaatgtcatgaaagaccaaaaaaggacaggttgatgaaattgtccagattaaagcagactaaaaggattaaaaaattaaataagagacctgagaactgtgatgaaggtgggagtgagaaaagaaaaaaaaaatgtttttttttttttgagacacagttttgctctgtcacccaggctggagtgcagaggcacaatctcggttcactgcaacttccgcttcctgggttcaagcaatcttcccacctcagcctcccaagtagctaggattacaaacatgcaccaccatacccggctaatttttgtatttttagtagaaatggggtttcaccatgttggccaggctggtctcaaactcctgacctcaagtgatccacccacctgggcttcccaaagtgttgggattacaggtgtgagccgttgcatctggcaaaaatttttttaattaaataaaatgcctactcctgtagtggatactggatggggaagaatattgctatgaaagacattattgaagaaattagcaaaatttggatatgtattctggataagaccattgcaaccatgttaaatttcctgattttgatcattgtactgtagttatatttaaaaatatacatttgtctgtgtagatgcacgcaaaaggtgacgtcatggcttactctcaaatgattcagcaaatacatgtgtacatgtctgtgtgtatgtgtatacacatatatatacacatgtgaaggacagacacagataaggggaaatacagagagagacagagggggagaaaatgggccaaaaagaacaattggtgaatctaggtgaaggataaaagagcattcattgtgctattcctaggacattgaatttttcaaaataaaaaaaggattttaaatgtcagtacaattgatagctaattctgatgctagaacaatgttatcaagatgttttcacatatatctatgtttaaatataaactattattttcatgtttataatgaatgtgatgcatttttccagtcaaaagacatggtccgcaatgcaaagtcagggcccacatcttggtgttatgcacagaaacacagagattagcactgtaacttccacttacagaatatccaatagttgcttgttaaggccgtgtagttttagggaacattgttaaggacatgaaagatttttttaatcactgtgactgattccccagttgagaacaggaaattacataaaatatggagaagttttccttcttcccacttcagctaccagatggcagaagagaagcagatagtctttagggaatgttagcagccccagagaaaaaaaaccaaagacactgtcaatggaagttacccaagacacagccataatatccaccagcttcccctccacattggttgagcatcgccatcttgctggaaggctgaatggcttcccaaggctctagataaatctccaagacagagagctgaaaaatagaaatttctccagatgcaatgctgccagcaagggggctgagctcacacaaactatccacagcagctgcagctgaaatcaggtgagccaagagattgtgattgggaaaccaaaagtgtccacaggctgctttcaggaggagacttctgccaatacttcactgctccctgcccacctctactcatttgctcccccatctcccaaaaaggaggaagattcattgatccaattggggaaatagtgatctttattggttcctgtttcactagtgggctaagttgccgcatctcaaaagcagatacctcatcaatattttgtctctttaaccactcaaactcaggcacagctggccctcttacctactttttcacttcgtagatttctgactgcatgtggcagggacacttggcaaggtctacctgaagagactttccaaactttctctctgttctgccaaagtgtaaggttaaccaggtagatctgtaccacagacaaagatgtctttaatttagtgggagggagcagaatctgagatctttggttttaatgggcggacaaaggacaaaggagggtgacaggtcaccagaataagacctattcaaagagcaggtgtttaacttaacagatgtggaacaggaaatacgtttgtttagttgtttttgctttttttaagttcaaaggatacggaaataatgacaaagaaacaagggactattaatatttatcaagcagatttgaaaaacaatcacacagatgttttaaaggtgaaaaatataacaggtaagtgagaaatccagtggattaaatagtagattagacactgctgaaggataagatagatatcaagaaattatcaaaagatcaacccatagagcaaacaatggaaattacgagagagaagttaacagatgtggatggtagagtgaaaagttccagcatatatctattcagtgtcagaaggagaaaagcaagtgaatggaggagtggtaatatatgggagataatggctatcattttccagaattgggtaagtttcataaagtgcaataaaatgttagcagcataaataaagagaaatctgcacctaaacataatttagtaaccaaaaaagagaaggtcttaaaagcagctggggagaaaagatatattgcataaaaagtagtaaaacttagactgatagcttatttcttctaaaaacaatggaagacagaaacaagtggaatgatatgttcaaagagaaaatacaggcacaccttggatatattgcatgtcaacttccagaccacttcaataaagcaagtcgtacacattttttggtttcttagtgtatataaaagttattctgagttattcacttaatagactacactattttatagtctattaagtatgtaatagcattatgtctaaaaatatgtatataccttaatttaaaaaaaatgcttgattgctaaaaattgctaataatcatctaagtcttcagcaagttgtaatattcttgctagtggaagttctcacttcaatgttgatggctgcaaactgatcagggcggtggttgctgaaggttggagtggctgtggcaattgaaaaaaataagacaacaattaagtttgccacattgatggactctttcttttgtgaaagatatctctgtagcatttggtgctttttgatagtgttttacccatagcagaacttctttggaaattggggtcaatcctctcaaacctgccgctgctttatcaactaaccttatgaaatattctaaatcttttattgtgatttcaacaacgttcacagcatcttcaccaggagcagattccatcttaagaagccactttatttgctcatccagaagaagcaactcctcatccgttcatgttttctcatgagattgcagcaattcagtcacatcttcaagatccacttctaatcctagttctcttgctatttctacgacatctgcattgacttcctccactaaaaccttgaatccctcaaaatcattcatgagggttgaaagtaactccttccaaactcttgttaatgttgatattttcacctccttccatgaatcgtgactgttcttaatggcatacagaatggtaaattctttccagaaggttttcaatttactttgcccatatccatcagaagtatcactatttataacagttatagcctcatgaaatgtatttcttaaataacaagacatgaaagtcgaaatgactccttgatccatgggctacaaaatgcatactgtgttaacaggcatgaaaacaacattactctccttacacatctccatcagagctcttgcgtgactaggcacattgtgaaagaaatccttttttctgagaagtaatactcaacagtggacttaaaatgtttagtaaaccacactgaaaacagatttgccatcatccaggctttgttttttttagttcacagagcacaggcagagtagattaagtataactcttaagggccctaggattttcagaatggtcaattagcattggcttcaacttaaagtcgccagctgcattcgcctctaacaagagtcagcctgtcttttgaggctctgaagtcaggccttgacttctctctagctgtgaaagtcctagatggctttcatccaatacaaggatgttttgtctacattgaaagcctgtcggcccaacatagtggcttgtgtctgtaatagcactttgggaggctgaggcaggaggattgcttgagacgaggcctcatctctaccaaacaatttttttgttgttgtttgaaattagctgggtgcaatggcacaccggtagtgctagctacttagggaggctggggtgggaggattccttggccccaggagttcaaggctactgtgagctatgattgtgtcacttcactccagcctgggtgactgagcaagaccctatctctaaaaagagaggagacgagaggcgaggcgaggagaggagaggaaaggaaaggaaaagagaaggaaggaaggaagaaaggaaggagaaaggaaggaaaggaagaaaggaaaaaagaaaagaaaagaaaattcttatggataacttgcagcagcctccctctccatcagcatttgcttgcttcaccttgcacttttatgttatggagatggtttctttccttaaacctcaggaaccaaactctgccagtttcaaatttttcttctgtagcttcatcacctcttttggtcttcctagaattgaagaaaatcagagacttgctctggattaggctttggctcaagagaatgttgtagctgatttggtcttctatccagaccactcaaagtttctccacatcagcaataatgctgctcttttgctttcttctcatttgtgtgttcactggattagcagttttaatttccttcaagaacttttcctttacccttacaatttggctgtttggtgcaagaggcctagttttaggcctatctttgctttcaacatgcatttctcactaagcctaatcatttctagcttttggtttaatgtaagggatatgcagctcttcctttcagctgaacacttagagaccattgtaggatcattaattggcctattttcagtattgttgtgccttggggaatagagaggccctggggagagggagcgagatgagggaatggctggtctgtggagcagttagaatacacacatttatcaattaacttcactgtcttttatgggcatgggtcttggtgcccccaaatgattccaatggtaacatcaaagattgctgatcacagataaccataacaaatgtgataattttaaaatttgaaatattgcgaggattaccgaatgtgacacagagatatgaagtgatcgcatgctgttggaaaaatagcactgacgcatttgcttgaccagggttgccacaaatctacaatttgtaaaaaaacacaatatctgcaaagctcaataaaatgaagtgaaataaaatgatgtatgtctatatttttcaagcccgaattctatactcagtaaaaatatcttttgagagcaaatgttaaatatagacattttcagacaaataaaaactgagaaagcataaactgggtggtgtttgtttaaataatataggagagagctatatagtgaaactgaaataaccctattaattatataaacatatatattatatgcactcttatgtcatactttgtgagagggaaaaaatagtgaatcagtttactggcaacaattttattctaaaaggtcatctaaggaatgtgtttaggcagcaagaatgcccactttccccactgttattcaacatagtacaagaagacctagctacagcaatcagacaagagaaagaagtaaaggacattcacattggaaaggaagaagtccaattatctttgtttgcagatgatatgatcttatatttggaaaaacccaaagactctaccaaaaaactatgagaattgaaaaacaaattcagtaaagttgcaggatcaaaaatcaatatccaaaatcggaagcatttctatatgccaacagtgaacaatctgaaaaagaaatcaagaaagtaatctcatttataatagcacaaataaaattaaattgaaattttaaaaatggaaagatattctgtgttcatgaattagaagaatcagtatagttaatatgtccataccacccaaagcaatctacagattcaatgcaatccctgtcaaaataccaatgatattctttgcagaaacagaaaaaataattctaaaatttatatggaaccacaaaagacccaggatagcaaaagctatcctgagcaaaaaaataaagctggaaaaatcacattacctgtctttaaatatactacagagttataataaccaaaacagcatgatactggcatacaaacagatacacagaacaatggaacataatatagaacctagaaaaaaatccacacacctgcagtggactcattttcaacaaaggtaccgagaacatatacactggggaaaagacagtctcttcaataaatggtactaagaaaactggatattcatatgcagaagaatgaaactagacccctatgtctcaccatatacaaaaataaaatcaaaatagattaaagacttaaatctaagacctgaaactatgatactattacaagaaaacactggagaaactcagaatattggtctgggcaaaaaagtgattccagaaacatagatatgagatgcaagaagggattttgagcaagaaaaatggatgaaatatgcaaagggccaagcaaatattcacagtgtaaacagtagaaaaatacaaaattcaagatagagcaacaaaatatataacttggggaataagtcaacttaaagtagtttcaaatattttattattgtgcaggagcagataaacacattgatactcattttgaactcttcagctaaatagtgatattaatatttccaggatatttgcttaaaaaatggaattttctaaagaatagacactattagtagagagaaaaagttagaatgaggtgaaaattcattaaaaacaaagtaggaaaagaaaacaaaaaatgttttttaaaataggtcaaatagaaagtgagaactaaaatagcagaaattaattgagatacaccagtaatcaaaataaatataaatgaagtctctagataacaaataaataaataaatataaatgaagtctctagataacaaataaataaatataaatgaagtctctagataacaaaaaataaataaatataaatgaagtctctagataacaaataaataagtataaatgaagtttctagataaaaaagattgttaggctaaacttattttaaaatactacaaattttttcaatcaaatattcaaattggtcacatctgagtttgcctttatacaaataaaagaaatatggaatcagcaatcttagatggaaaacagtggtagagccagatcttgcaaattatttaatttgttttttcttttgagaaattgagtaaatttgaagctagaaagcccatttgaaacaattttttcaatctcaatgtttttgttctatgtagtgcagcttctgtgaaactcagatgttaaaatagctccaagttgactggcttgagataaacatgttactggggctcctactgacccaaggcccccctacaagtggtcccccgtctcttcattccacacaaatagtcatttacccagtgagtgtgtgtagtaaataatcttaatattattaattgtttggcctcattcctgagatgcctgggttacccacactctgttggcttattggactgacattttctttctttctgtttttttttcttcttcttcttttttgagacaagttctctgtcacacacactggagtgcagtggcatgatcatagctcactgcatcctcgaaggctggggctcaagcaaccctccacgcccggctaatttaaacaaaattgtttttgtagagataggatctcactatgttgcccagactagtcttgaactcctgacctcaagcaatcctcccatttcagcctcctgagcagctaggatgataggcaccagccaccatgcctggctaatttgaactgacattctcttaacgaaaataccacaatgaggtttgtggccatgtcagagcagaagcttagatgtgacaataagaagtaaacagtctacttcccctcaccctccactctacccccatgactatcctgcatctagccacatcccctaatatgtatgtggctcagggtgaccaggaagaaaataattccagactaaaacttcataaatgagacatatgcaaatatttgagagtcttttagaggggaagaagggagaccattggtgcggagggcaacagttctgcagaaattgacctaaattgggctaaacctggccttgctgagggatcctatgcctggtaacttgatctttaatcctttcaggctaataaccttaaatacctcaaaatgagctgaggttattttgttccaggtactatacctgctaaatagtctccagaaaagacaggtgggatggtgaagtgcggaatgcaggagtgtataaaaatgctttgtggaagaggaagggtagacttctcactgctgctacaatcctctctttttggggatcagtgtagcagctgattatcccggtagctatttggagaatttagaattctgcccttcaggttaggagcatgcttcagggctctcctgccttgcatcactatcttcatggatttccatattatttgtctttaaagaaatgtttcatcttctaactgagcttcttggctgtccattaattataccaccattccatcatgataccaaatagggatcttgagatgaaggtttcctgaattgaggaagaatctgagaccatagcctacactcaacagagcctgcatattgaaaatggcagtgggtctgagtttagtggttatgcctgcagattctgtgagagggaaatttggaaaaataggagtttccctgtgcttgtttcctcatccataaaatgggcatcataatctcttactaccagactaaacatattaattcactataaagcatgataaccagtaagaattcattatagtgttccctaataatagttacttttattattgtgatgtcataattattgttattattatcacattaatgtgtacttgaaccaatgtccccaggtcattcctatatacacacggaaggaaagggttatatgataaaacagaaggagctatattaattgatgcccaaacatctctgctgcagaacttattttcagaagatatgaagtttagagggagaaagtttttcttgactggccaaacagagatacaaacattggagatttaggggcacgtggaataaggaaagaccaaagcccccaaggagaagaaataattagaggtcaagggcagatcagcatcatctcagtggctcaagctgagcactgattaaattaattggagttagggttaaggtagcaagctctggcaaagctggcaatgtcactttgagcagaaaatcagagtatcagccaatggcacacatgttatataaagccatccttgtctcgtttggaaattcccatagagagtgagctgctggtctagcagactattgaagtcctgttacctaataagtgggaatacttagatggaatacgtattttataaatagattcctgattacattaaagaatagaaaataattttctggccagtactgataagagccccttcattctccattgcaattatcaggataaaccagagtgttttgttcattatgatcaaggcatgagctgcaaatattgcacttaaaaagcatttgctcttatctcaaaaagagcaagtggtctgtcgctattcttactagctcccaatttgtagaaggtcaggttcatagactccccagggatacatttgagatattttgtgcgttctggatgatattgttaactggatgactgagttcactgtaatagctctgacttttattgttggggactgaaaacttcaggcttctttgctgcagctacttcaaatcctcatcttttctgataatttaatagaagttgtgagggaaggcaaagcatggaatggttagccaagtgggagtcctattgaggtttttaatggtctcaggcaattggaaccatctctggtcccagaggaggctccttcccctgtagtagtgattacttactccttagaaatacttaatgccctggggttaaaggttttgaaaactactgcaaaggtcactttagccacagtgcttctacagggcaatgagactaacctggttatgcatcatacttaatcgaggcagtatatgcatgagcagtttctcaaaatatcatccccagtcagcaggagctacatcacctgagtgcttgtcagaaatgcacattcttgggctttaccccagacctactcaatcagaatctctgaagatggggtccagcagtctgtttttaaaagaactccagaaaattctgatgcacactaaagtttgaagaaatctggtttacagagaccaacaagtcttgactgttttatcagaactgacctgacaagtcagctagaccaaaatcatgttggcatatcaaaaagtcctgaactatggaaaaatttaccaactgtaaagtaagtttctcaaagggcctaactctcttctataaactggtgtcccaggctagaggaagcactctaggccattagcaaaaataaataaataaaaaataatacaccaactccaacattcaggaattctgatgcaattggtgtagtgtgctgcctaagcctcaagcattatccccagttgatttcaatatgccactgtggttggctgattgccaaaactgaccacacgttataccccttctagcatccatattctttgcaaggtgcgtttgtcatttctcctgttaagagaaatctgtttttccactctcttgaaggtaatgttggccacatgacttgctttagccaatgggacagtagcaaacataatataagcagaaacatggtgctatatgttggatgtttgccccctccaaatctcatgttgaaatttgatcctgaatgttggaggtggagcccagtgggaggtatttgggtcatgggagcagattcctcatgaatagattaatgccctccctgggggaggggatgagtgagttctcactctattagttcccaagttggttgttaaaaagagcttggtacctcccttctctctggctttccttcttgccatgtgattttcacacatgctggctctgctttgccttccaccatgagtgaaagtttcctgaggccctcaccagaagtaaatgctggtgccatgctccttgtatagcctgcagaactctgagtcaaataaccctctttttaaaataaatttcccagcctcagatatttctttatagcaacactaaattgactaaaacacttggaaggtacttatacattggagcttgctcatttattgcttttggagcctgaaactgctatatgaaaagcttggaggttgagagactatgcagaaaagaccccagttagcccatctgtcacaactccaaacatcacaaatgcagacagctccaactcacttgccgacaacaaatgcatgagcaagcccaaccaagataagccaaatgtgaaacaagaactgaaccaccatattatgagctaaataaatagtggttgttttaagccactaaatttgggggatgtcattaagcaatcatggacaggtggaagttaatgtttgctgtcaatgaatggtaaaaggagctgaaaggagaatcatcaagtcaaggtcgttccaaacacccctctctttaggattgcttggttcagcccacgaggccactctgagccttcacatcccctcctttcaggcaagaatacccgataaccagtagattccatgaatctcctgattcactcagccatcactaacggcaaaaggagaactggatcataaaagcctaaagaatttggagagcttcaaggaagatataacacagatttgagtccaaaatatatttttacaggagaatactgaatggaatatttattgttaagcatctgagacagctttgtttctggattatccccagcagggattacagaaagcttatgagatttgtatattaaatcatcacaaaaattttttcagtatgtataaggagatgtatttcttaatagaagggaaaccagtaggaaataataattaaacatgatccttcactcatgatgtatggtggttccaatatccttctgccactcaaggtacgataaggaggatgatattttcactagggggtaggtttgatttgactcacctcttgtccttggttatgtctcatctctccatcctcattgggctttagtccctcccctcttctaactctattatcttattgctatcttttctagccgggcctctatctagttcccttaaccctttacctaacctattccttcttttacaatgttttaaatttttattatcttaaaagacagggtcagctgggcatggtcgctcacgcctgtaatcccagcactttgggatgccgaggcgggcagatcatttgaggtctggagttctagaccagccaggccaacatggtgaaaccccatctctactaaaaatacaaaaattagccaggcatagtggtgggtgcctgtaatcccagctactcgggagctgaggcaggagaatcgcttaaacctgggaggcagaggttgcaatgagctgcactccagcctgagtgacagagcgagactctgtatcaaataaataaataaataaaagacagggtcctgatctatcactcaggctggagtgcagtagcatgattattatagctcactgcaacctcaaattcctggcctcaaggggtcctcctgcctcagctttcctagtagctaaaactacagggacatgccaccacacccagctaacttttaaaaattttttgtagagactgggtcttgctatgttgcccaggctggtctcaaactcctggcctcaagcaatcctcctgctttggcctcccaaaattacagacatgagccactgcacccagctctaatttactccttcttatttccagattttatcttgaatttaactcttccaaaaggcccagtctagactaagttactggtctgttttccatattcattcttcctgtatgtacttttatcataacgctgtcacctatattgaggtgactgtagacattgggtagcttcagagtagaattaatatcttatccattgttgcatgttttctattagaaaaatttttgtctacacgtgacaaaaacctggctaacacagccttaacaaagaaggtttattctctgcctgctcaaagtaaaaagcaatctggaggtaggcagttggtggctgtgattcatacagtttaaattgcaaataggaattctagccctttctgccttgctgcttcaacatcctgaggtcatgactgattttatttcatctttattattattaataaactcgtaggtacaagatggctactatgcttctgggtactatgcttacaattaagtcaggaaatggaaacaccagccaggtttacccgttttttcatgaaagcaaaagttattccggaagttgcacagcagaggtctgtttaggtttcataatttaaaatgtgtcttatggacttccattaccacaagagagtctagagtagcaagtaaaagcagaatatttatgtgtgctgcgtgtgttacagtaagtagctagtcagacatgagcagagcaggagagggctccctgtacacacacacacacacacacacacacacacaccccgagaatgtcaggcgaccattgggtgatggtcaggtggttgttaactgtctctctaaagtaataatttgccatagccagcaccagggaaaggcagtttctcaataaacataaacacctgaaactggtgatcagaagcttcctaagaagatctcaggagctgggcgaatgggttcatgcatgtgcattaagagacaaaatggtagagtttaactggtatatgaccttctaggaatatctgactggtaagggaagaatacctcaagcgagcatgcgtacagctccagtaaacacactgcggatgctcccctcccaagggcttgcaggccactgcacatgtacacagcctaccccacggaagaatcaggggagaaggaccacaagactccggaaacatgccaacatataaaacttcaaatcaaaaggtcaaaccaaggacttgatctctcaggtcactctcttggccctcttgcaagtgtactttacttcctttcattcctgctctaaagctttttaataaactttacattgaactttagacaactcttggtctaaaacttgcctcagtctctccttctgccttatacctcctcagtcaaattctttcttctgaggaggcaagaattgaagttgctgcagacctgtatggattcgctgccaataacacatgtatatttgttgaataactatatgaagaaattgcattgcagataagggaagataataccgaacttctccctttaagagtccttgactctcacatcatgaacgctacaggatagcaatattaggcagaagattgtcacacctgactcagtggtggcaactttaataaaatccaaggattcatgcattaaactttttgcaggacattgggtgagccatgtaggtggtataaattatggaatccagccattccacagtctaatggagaggctatgtatagaggttgaactggaaaaggttatttcaactttagaaaaatttcttctaaggaaaattcatgtgggaatttaaggaagttaatgtctagcacccattttttaacccatccaaatttggaaccaacaaggaggtggatgcagacatcaatcagaattcaaagtataacttttatgtctcaaaaatgctaaatgcaggaaagtgctttctatctgctctccaatatggcttcctgagtggaatttgtgtatgaattacaggttcttgggaaaacaccagttgccccatgggggcctgttcctgaaaaacttacataatgaaagggatgagaatgtgaatgatctttgctagcaggctggtaccacagagcaaattgacaccagcttggaattgagcttcttctgaactcacctatcaattgagtcttttctcctgtccttcagaggactgggtaagggaatggaaaaagaccagaagtgttaccctttagaaatctctttaatggaaacatgaaatcagggaagggagactccatccccagcagacaatatgaaaatgccttcttacctccttctctaggtacactgataaattgttttcttagcacctgctgctaaactagagaggtttaagagacttgtatcttaagagatgccatggcaacaaggataaagaacctgtggcagatgggacatgtttatccagagacagtgtttgctagtggcaccttacaaagagtaaataatgatgatgatgatgatgacaatattagtaacaattctactctggaagttactccagaagtgaagagagacgggttttattttgagtgaaaaatggaaaatagaaaccagaagcattaaaggatataaattaagattaaaaaataaacaatgtgagagggatatgatgaagaaattattagccatgacaatttggtgttagcctctgtttagaacagtgttcgtcaaattgttctttattactgaccccgtaaagagactttttagatgttttcatactaatctcctccccactccacccaattgataaaaccctaacaccacgatatcccgtgtatctgtttatgttactctggtcctttgatgggccaaaggccactgtaacatctaaaatcctgccccccacccacaacaccacacacacaccaaaaaccaattttatttcctttggaagcaatattgcccctgttgattgagaatgcatggcttaagacagtaacaaatactttatattctgtgtccatttcttcaggccttttggattccttcaattcctcataaagagacctaaaactcatgacccaggaagaaactaaaaattgttttcataaaatgaccaggtatttttaaaacatttcactgcttgaattaacattttagcagccaggtaaggttttatgtctcataatagcccattcacacaccctgccctagcaaccaatacttcttcatattatcaccatacaaaactacacagtccatcagtcaatcaggcaagcagtctagcaacttttaaaaatcagtttagagggtttttaaaaggtagattccaaacttatcatcctttaaaaccaacagtgcaattggtagaaactatggtggtttgtctatgtcaaatctgtgacacaggcccctaaaataaggcattgtatcagttagctactgctgcataacaacacatcccaaaactcaataccttaaagtaataaaaacttactattgctcacatgtctccaggtcagctgcatatacttgtggtcttgactgggctcattcatgcctccatattgtattttgaagaagcagctctgcagttcttggctagtctctctcatatgtttggaggttagctggctaaaggccagtctaggaagcctctagatgttataattgggctcccctccatgtgatctctcttcttccagaaagctagcctggccttggtagcatgcaggtatcaggggtccaaagagagagtagacactacactaggtaaactaagtagcttttatgattgttagataaattagtaaatcacaagtaaaataaacaaacacacagcactgatgcccataagtactgatttccttatgaaaaagagaaaccgagtggcataatggaaagggaattaaagtaagggccagaggctggatttcttattctaactttcctaggatgtaactttagacgaataactcatgctctttcattctccatttccccacctgtaaagtgttatgccttttcttcccatctccaaagcttgttctgatgagcaaataagatatatatatatattttttttttttttttttgagacggagtctcactctaccacccaggttggagtgcagtggggcgatctcagctcactgcaacctccgcctcctgggttctagcaattctcctgcctcagccttttgagtagctgggacaaccatgccctgttaatttttgtatttttagtagagatggggtttctccacgttggccaggctggtcttgaactcctgacctcaggtgacccacctgccttggcttcccaaagtgttgggattacaggcatgagccaccgcgcctggcctgagatttgaaatggtgaagttccatataaacgtgacttattgtcccttcccccatgtgtttgcaatctctgaaccattccttttactaattgctataattaataagcagaaattttctgtgttacttgagtaaaaggattggagaaactgttcttcaagaaaaatgaggatacttagctttaatgtttggctatgttggtaaaaagccaaatgactttgggaaacccctatgaccttgggaaacccatatgactttgagaaagcctgtgacgcttgacccttaaattctttgaagggaaaatcacagtcccagattttattatttctgaggtttcttccatcactcagattctaaatgaaccgagcttttattgcaacaagttaaaatctacgtttatgttagtagagttaaaaagcaaaggagatagaactaactgacccaggcattctggtggattagaaggaataagagaatattcttaattacagtgaacctttggaaatgagaggaaagagagaggaacagaaagggaaacaagatttggagaggacaataaggaggaagagtactgaagagctagaatgagaggaataggcttagattacggcattatccacaggtcttaaactaaagttctatcagctggaacccagaagggtgttgaaaaaccagcacaggacttttacaaagtggaatgtttttagttggggcaaacatattccatttggccatagctcccaacactcaacccaaatcataccttcgtgttacctgcttgcttccttttaggaatctgattttgcaatctctggttgttactgagcagtaattaaaacacagctccccaccccagcagctccagttatatactggatggaaaaattaccctatgtctctattgtctctaaactgtaagcagtaacatctaatttagggggtttgtgggaataaaggggattagcaagtctaaagagcctagcaaagtggctggctcataggagatactcactcaatcttcattcttttttcctttccttcccttccttccttccttccttccttccttccttccttccttccttccttccttcctctctctctctgtctctcgctctctttctttatttttgagacagaatctccctctgttgcctaggctggagtacagtggccggatctctgctcactgcaaactccgcctcacaggttcaattgattctcttgtctcagcctcccaagtagctgggattacagtcatgtgccaccaggcctggctaatttttgtatttttagtagagacaggttttcaccatgttggccaggctgctctcgaactcctgacctcaattgatccacccacctcagcctcacaaagtgttgggattacaggtgtgagccagggcacccggccttcattccttttttctatctgtctctcttgtttctctctcttccattcatttctcttctgcctattttcttcatttgtctgtcctttttctttctcccagtctttctcctctcttctctcctgcctctgatgcaggggctcacacctcagggacctctgagctcagctcctactcctcagaaagggaagtacttcctccaagattagaatcagctcctgctccattcctacttttaggagaattttactgcaagattcatgccacagtgacaagaggagaatgagggtgtctcagaataccttcgattggatggcttataaacaacagaagtttatttttcacagttctgcaggctgggaaggaagctctctgggcccgtttcacaagggcaataatcccgttcatgagaactgcaccttcatgacccaatcacccgctaaaggctgcacctcttaatagcatcaccttagaggctagggttttcaacatatgaattttggagagatgaatattcagacaattgcagaggaggcttccttttctgaacttggggcttctagaatcagtttcatatccctggacgaaagttttatcagaaaatcaggattccaaataccaaaagtagagaacaaaaagtgatttggaaaaaaaaaaaaaaaaaaaaaaaaaaaaaaaaaaaaaaaaaaaaaggccaacagctgcagctacttacctcccatatcaaacgaagttattttaattactttactctttcttcttttagttgaaattgtttgatatggccaataccgaaatacaaatggaaaaacaccatggttttggtttttaaatggtgattttcttaaataattctgcactcaatgccagtttaattgtttcatttatttcttgatggtgctgccctttatgtaaagttaatggtgtgaaatgcactaaagaaatataactcggatttctgttaatagtttctgaaacaatctagaagatgattgtaaccattaatgagattccttttaattttttattgtaatgggttatttattctttctacatggaattttgctgggtaattgattatgttagtttcattccactttgcgactttgagtttttttttttttttttttagacagtcttgctctgtctccgaagctggactgcaatggcacaatctcagctcactgcaacctctacctcccaggttcaagtgattctcctgcctcagcctcccgagtagctgggattgcaggtgcctgccactgtgcccagctaatttttgtattttttagtagagatggggttttgccatgttggacaggctggtctcaaactcctgacctcaggtgatccacccgcctcggactcccaaagtgctgggattacaggcgtgagccaccatgccaggcctgcgactgtgagatttatgtgtgttcacaacattggagaacaatttatgtctctgtcatttctctcttctcattttagatgcttgtatgtgctcttcttaaagaaaagaagtttacccaaagtgttaggtgctaagacgtcttccctaaactccacctgattggccttcaaaccacaagctgactttcatgtctttcggggttagagcctctgttacccagagctgcaacctcagtataaaactcttcatagagtactaggaaggtgaaaagtgactttcctgacaactaggccatggtgttccttactgaacataaataatgctcacagctcaaacaagatgggataagaccacttggcacccaggaaaaatgattaaccatggccttctattgttcaacaagtgacagatgattctttacgaaatgtgcatccagccctgctttaaccttcccacaacctagagaaaattattcagatatcccagcttctagacaatgtccaatccagcatggcccctgttttattaaaccctccctagagtcatctgctacgggctaaatgtttgtgtccctttgaaatttatatgttgaatcctagcccccaaggaggtagtattaggaggtggggccttttggaagtaattgggtcatgagagcaaatgctcatgaatgagattagtgccttataaaagaggcccatgggagctcagttacccttccaccatgtgaggacacagccagaaggtgctggctatgaggaacaaccctcaccagacaccaaatccatcagtgccttaatcttggtcttcccagcctctctagtactgtgagaaatacatttcagtggtttataagctacctaggctaaatagtatttggttatagcagcccaaacagactaagacatcatccaacataaacccatatcctgtaagaaggattttcaaccccattaccaaaaacccctaccaagaacgccccaactcctcagggaggggttcctcctttgctgtagcaagctaaataaatctcactttgggccaggcatggtggcttacacctgtactctcagcactttaggaggccaaagcaggaggattgcttgagctcaggagttccagactagcctgagcaacatagtattataagaccccatctctacagaaaatttaaaaagttagacaggcatggtgacatgcacctatagtcccagcaactcaggaagctgaggcaggaggatcactagggcccaggagttcaaggctacagtaagttatgattgtgctactgtactccggcctgggcaacagagcaagaccctgtccctaaataaattaattaataaatctcatgttgtctgactcaaggtgtgttcctgaaggtcagtgagcttttcataagtacttgattaatgaattttcttttttaaaaaatcaactaattttgtgagcgtcttcctttccaaactgcaactcaacttctatggcaccattctctcctgatcttcctgctagtcccttatcttctctgcctccttttttgttccttttcctaagtctgcccattacaggctggtgttccctaagattccatccatttccttttcctaagtcacagtttttcatctataaaatggatataaatgtttacatatactgaggtagaaaattgctagtttccaccaatattcattctttctctcttccatagaaatcaactaaatttttttaatattaaaaactttacacatatactaaaaaacagaagtttgtataatgtcccctatgtacgtatcacacaatattaaccattatcaatttgtgacaaatcttgtttcatctgtatccctcatcccaacctcaccattttattttgaagctaatcccagagacatcagacattatatcattttattcatcaatatattagtatatttttctaaaagataagtagttttctccaatgtatcacacttaaaaagtgataataatatcatctaatactctatctgtgtttgattttctcacagtgttttctaactttgtttaaatcaagatctaaataaggtttatatattatatttggttgacaaaatctacaccttgaatatttttgtccttgaaatttttgttgaatataccatttctttttcttttccttttttcttttttgagacgaagtcttgctctgttgcccaggcgggagtgcactggcgccatcactgcaacttctacctcctgggttcgacctgttttcctgcctcagtctcccgagtagctgggactacaggtgtaagttaccactcctggctaatttttgtattcttagtagagacagggttttaccatattggccaggctggtctcaaactcctgaccccaggtgatccgtccacctcggcctcccaaagtgctgggattacaggcatgagccactgctcccagccaataaaccatttattttgtcctgttttgtttttcaccgtcttgatttgataattagcatttcctaagtgttgtttaacatgttccttcattcactgtgttttttcataaattggtagttagatctacaagcttaataaaaataagacatcttttagaaaaattacttcaaaatggtggtgtctactttaatttggaagcacatatgttctgcttttgttatgatgtcagcaggtattgcagatcagtacctagatcaatcaatctatctctcagtcatttttagggattgcaaaatggaaataattctgattcttttatttcttcttcatttgttagtaagaatatgttagcaagaatacatctaaagagagaaaatgtgaatatttttaagccggtgctatttttggtctcagtcacatgtggctgaaaccatgttctaacacaaggattgttacaagtattaattaaaataacacaggtagcatgcctagtaaaggaggaacaaaactcatctgacacaatggtttcctttagtgcctatcagctgacaattcccaaatcttaatcatcaacctaaacctttccagacccatgtatccaattccttagtaaaatctctacctcagaaacaaagtgtccatatctgaactttctccattcttcttcctttaattgtatctaaggggaacaatcaccatcaatttagttgcctaacacagcaacttaaaaccatcttataggctttcaactcttttgccttccacgtccatttggtttccatgtctcattattctgtttcctaaaaggaccatgaatctgtcctctctaccccctctaagtcttcactttcttaatcactgctttagttcagacctgtggcattgccctttttgactcctgcaataaacacttccagtctcacctttatcatgtgaaagcacttcttgtctttgttggcatgactgtttccccattagactagaagacatttgaggatagtacatttgtttttctttatatacctagtgcttagcagagtcactggtaaatagcagttactgaataattaataagaatctgaaacacctacgagcaggtaacagggctctatgtgtgttcatgtaattcaggggtgtccaatcttttcgcttccctaggccacattagaagaagaattgtcttaggccacacttaaaatacactaacactaataatagccaatgagcttaaaaaaaaaaaaagtcaccaaaaaatctcataatgttttaaggaagtttacaaattcttgttgggcttcattcaaagctgtcctaggccacatgcaactcatggaccgtgggttggacaagtttgacttaattcatcttcaatatagccctatgtggtaagtactattaccctctctttacagaggaggaaattgaggcattaagtggttacataattaacaaatttattcaactaggaagggacaaattaagaatagatcccagatattcactaattgatgaaagaaataagaaagggtgaatgaattgataaacagagattattctctattttatgaatatctagtaagcctctcatctgggctcatttgcaaaacatactctaccacaatgccagagagatatctagaaaaatccattggaccccaaaacatgtgctctatctttttactaatgccagagatttcaccatcagaatccattgccctctcttgaagttttgctctcctaagttaccaatgcactttggaagacaaataattttggttactcactgtcatgtattctttagtgtggatgaatgaggttaggatgggtggagttgggatgggaaggatcatgagagctgtggtcttctaagttgggtggtgatatgtcatgttgaattgtaactcccacaattcccacgtgtcatgggaggaacgtggtggaaggtgattgaattatggggatgggtctttcctgcactgttcttgtgatagtgaatgagtctcacgagatctgatggttttaaaaatgggagtttctctgcacaagctctctctttgccagctgtcatccatgtaaaacgttacttgcccttccttgccttccaccatgattgtgaggcctccctcagccacgtggaactgtaagtccactaaacctctttcttttgtaaattgctcaatctcaggtatgtctttatcagcagcatgaaaacagactaatatagttagagaagaagaaacactagcaacaacagaatctaacttcccctatgtctggattcttcattagtttttattgctgaatgtttatgggcttttatgtttgtttttattttttttaatagaaaggcttgggtcgccagaactggaaattaaaagtggtaacatggaaatctactgcatcattaaactcactatgaagatggaggaaatctcacagcaccagaatttatgagatcaggcagggcctggctacccaccagcaacttttcatccacatgcctgggtgataaattacactatcattttcagggaccatttgctatagaagagcaaattaacccagtaattttagaattatatctgaggcttcatgaagatgcatccagtctggttatgttttggtcctaaggccctggcttccggattcttctctgatcatactaacttcagttgctgtttgatttaggagtaccattatttttataggcttgaagcctgttatagtggaaagctagcaaaggtgaaggttttaattacctctcaattttctcatgactttgagttctacctgtcactactgagtttccttaaactaagttgactctgaaacctgtatgtaatttaagagtttgagatatttgattttattagctaagttgcatttatgttcacttgaatgagaaattacttcttcttttatgattgaatgctttatgctattaattgatgactattgataatgtagtatttgaatcaatactatatgatttttaaaattaatgtatttttacatatgaaaatgccaaaatattccctgactcctcagcttagttggacattgttctcttgtgtttagaaaaggaaagcaaatttcctctgctgttctttttctttatccttccaaagtcactcactcactcatccacccattccttcattggctaaatactcactaggcatcaaatatgtcccagacattttattaggggatagggataaactggtggacaagggtggccctgtcccaacttcacatttgagtgggttttacagaaaaggcaacagacagttgcagaacaagcctatgcaggtaagtacagagtgatctggacaattcaatgatgccatgtaatccagcctaagctcagggggtgctaccagctctctttctctcctttccccttctactctcctctcctgtcttctgctctcctctcccctaccccacatggctttcttccctctctgtgtgtcagcatcatttatccttggtgagacatgcttcttcactatggttatgcacttacccctatgcatattctcccagcatggaaaccctggcagaaaactcctttttcctctgtgtatatatgaattccaggaaagattctaatgggactttcttaaatgaatccctgtgaccagtgcaataggacactatttttggcctggcctgagctatattattttctgtgtgaggttaggtaaggtaacatgattgtccattccaacaaaccacctagaatgaggaccatccatcacaaatctcatcagcatcctttactccccttctgagcacttatcataatttgtaaaaatattattaaatttttgttatctgttaaatgtgagtttctctagacactaatgtccataagaatagggactgtggaaaatactgtgatactgatccacccagaagataatatccttattctgcttgcatccaatttgtatacctctgtatccctactgcctggcacatagtaggccttaaaacatatttgttgagtgaatgactaatgggtactattgactcactatactcccttgaaatggtcctctttatctttaaatttcctcttttaattccactggaaacttcatatctttttgaacacaggtagttagagttcagtagcaaagagaatgggatttcatcatgaattcaggcagataagagtttaaatccaagttctgtcacttcctacctgaaagtcagcttacttcaccgtcctatgaagatgtctgctttgtattgctaatttgataattaactgagatagtatgcagcgtgcttatgattgtgcctatagtggttttacaacatgcctgcaaattctttgtcgttctatcacttgatagagtgtaattctcctccctgaggatgcgctggcctcagtgactctgttctcattaacagaatgtggcagaagtgacactgcatgactttcaagtctctctcagggcatatgcttttggagttctgggctaccatataagaaacctggctacctgaagctgccattctagagagatcacgtagatatagagcccccgctgctccagcccacagctgcttgtgtcttcctagcccaggcaccaggcatgaaagtgaagaagtttccaagatgacccaactctgtcctgtgcctgattacacagccaccatcaagctgcaagtgcaggagaagctgcaaccaagagcctgccaatagagcccatttgactttcagaaccatgagaggtaatgataataaacggttgttgttttgtgacactgaggtcaaattggtttgatatagagctatttgtaaataatcatattaatgagttacatggtagatggtcagtaaatggtaattttaaagcataaactttaaaccacaaagtaccatctcagagtacaggatatatcacatatcaaacaagcaaatgaagtaaatgatgttaggactagctgtcacttgtaataatctcaactgctgtaaataaactagaactgacttagtacgctgcatatttgatttaaaaaataatgtgtgagacaatgtagcccagtggttaaagtcatcagttttggagacagaccacttagtttcaaaacttagttggttatttcccaagcgcaagatatccgacaagtttcttgtcctctgtaatattgtttttacataaaacaaagattttataataagcataaatggaataattcatgtaaacttagcccactggttagaaaacagtgcctgataaatgatagtgattattatatcgggaatctgcacccaagcaaatgaaagctactgggccaaatggtgatggacttccaaaccgtgagatacaggcagtaaggagccattggattaattcagaaagcctgacacagagacaacagtccacacataaaatgcatgcttgacagaatagcctgcagatgccatctgaagatgcctaaattatcctatggtaataattaacattctgtagcatgtattcattatgctttttattagataatattgttgttgcccaggctggaaatctcattgggccacattcttctggtagtaaattctctccctacacttcataaactctttgagaattacattaaaatttttattttcctggaacaaaatgtatgcccatggtaaaattctttcacttaaattagtgaaatcagagcagtagcacattaattttttaggattctgtactgcaagcacagattattaagccttatctactcaagtcaggttaaaattttaagtagcattctgttatgtgttgttcataagttttcttatccatttatggtggaagagaggagtatagacatattaatgctgcaactgctggatgttcattcaaggttttgcccctgggactatacacagataattggtaaggttagagcttcatatctctaagtggaatcaatttttaagtgatttctaaaaaaaaaatcaatgttcaaggtttgccttttctttctttttggctgaagatctgttctgctggtacagacaaaaataatactactattgaaaactgacaaaacagatgaacaaaggaggttatttaacaaagggaagccccagaaacttccctcctgttctctccaagtctttctgtggcttaaagaaataaccctccatcccggttttgctgtctttttctttttccttggtatcaaatgagaacaatggtttcttcaaagtgagtaaacactgatgcactgggggtgaaagctttagaaaggtggatgtttctgcaattattttgtggacaatatgcatagatacatgcctgttccttacttcaggaacaatattttgtctgtgaaaggttataggagagtggtcgttttatattcatgtgtttcaggagacagttttttgattgcttgtcaatgggtaatatgtaaacgatgaataaaataaaagcttaaaatcaaagctatagaggtgtctaagtttttcaggataggtatacatagggaaattttaaagatgaatttttttaatcatgggggtttattttgtccttttttaaaaatttattttttatttccgtatgtttttggggaacaggtggtgtttggttatgaataagttctttagtggtgatttctgagattttggcacaccaaaaagaaggatatttgtggcaattgaaccatctcagtcttcctcgtataaatattaagccaaagagcgtgcagaggaatgtcttacccataaggaatgggtaaggaatgtcttacccataaggaatgggtaaggaatgtcttacccataaggaatgggtaaggaatgtcttacgcataaggaatgggtaaggaatgtcttacccataaggaatgggtaaggaatgtcttacccataaggaatgggtaaggaatgtcttacccataaggaatgggtaaggaatgtcttacccataaggaatgggtaaggaatgtcttacgcataaggaatgggtaaggaatgtcttacccataaggaatgggtaaggaatgtcttacccataaggaatgggtaaggaatgtcttacccataaggaatgggtaaggaatgtcttacccataaggaatgggtaaggaatgtcttacccataaggaatgggtaaggaatgtcttacccataaggaatgtcctccctgagaatgggctggcctcagtgactctgttctcatgaatagaatgtggcagaagtgacactgcattgacatatgcattgagtagataccacctgtgtgcaaaatactcttgttactttatcagtctaataataacaggcctcactctcacaattctgaactcagaggatacatgtatttggtttgaggatttggcacatggaatgccttctttcatcatagcccgcagtactctggcactggaaaatgaaagtggaactcatgtcaagtttgaatctcaaattatgtcaaagcatgagattattttcagtgcaaagaggattgcaagagagggcttacattttatgattgtggaaaattaagaaaaaatacctttggaagagagaaagtggaaatattatcatatctttatttgacttcagcgtttgtatttttcatcccaattgatagataaaaatgggcaagaaaataaatgtatatatttagagaactggtttgtcaaaatatagccaaatatcatattagtcactgggttattttacaaatattaataaaataataatattaaaataacaaacttaggcaaacttactatctcccaggcactgttcaaattgctgcatacacatgaattaattaaatcttctactaatgagaaaacaagtaatggagagtttaagcaaattttccaatgtctctcagagctgtggtttgaaccccagcattctggctccagagtctgttaaccactacatgtgtatggccgaagttttaattgtaaatctatggaaaagatgagtcaaatgttatgaactgccacattcagtggcattatggacttttttggattatggatcttttttgatggttggacatactaaccagagcataaaaagttctgaaaatacaggcattcactcatttgacaattaaatccttcttcaacaactgtactcagccctaaggacatcacagcaaacaagccttccttccaattcttaaaaggattcagtctcccaaggagacaggaaagctgggaatttaaatacagagttataagtgttaagatggggaggcatcacgggcatacaaaaaagaagctactgattcagactttttggtggaaggaaatcacagaagccttcttaaaggtggtgacttccaatcagagatcccggtaaaataagactttaacctgttgaggcaaaactaaggggttgcaggttttggagaagtgaaagagtccagataaagaaagcagcatatgaatgaggcacttctcttccaattaagaaattttaaaaccaccttgagtatatgtgcctattattataatagtttataattaataataattaatactttaaattggatttaataaaattagcagctattattttctcattttggaggaatatgggaatggtagattataaaatgactgtacctttttctcctctttatttttatttttattttttatttttttgagacagattctcactctgtcacccaggctggagtgaagtggcatgatcttggctcactgcaatgtctgcctcccaagttcaagcagttctcctgcctcagcctcccgagaggctgggattacaggtgcccacaaactcacctggctagtttttgtatttgtactaaagacagggtttcaccatgttggccaagctggtctcgaactcctgacatcaagtgatccacccgcctcagcctctcaaagtgctgggatcacaggcatgagccactgcacctggctcctccttatttttagaacatagcacttttagatgtgtaattcatctaggaatatgtatatgtgtgtgtgttatacccatgagagaggtattcaaaatctttgggaattttgacactgcatcaacccataaggccaaaacccaggtactatataaaaatgtatacatattttcccctacaaagctattctgccccaacatcgctcatataaatattattttttacatcattatgaaacgaacatccatcatgtctctatgtatcctcatataaaaagtacggtttgcttatctctgaaaggttatataaccactaaaaaaaaaaaaaaaaaaaatccagtaatgtgtttttcatttgtttcagttgcataagtaggtgtcctattttgcaataaatgaaagaccaccattgatagtaaaactgcagagaacattttgtcaatgtttcaggaatgctttttgaagcaacccatgactttcttttctgtttcaagaagatccgtatcaaagagaactaaaatacattgaaaccgtgctagtcattagagctggcatctctctgtattaggttagtggtatcaaggtacttacacaccccaagagctgtatttagttaagtgcaaaagtacaggctcttccattcaggcagggtaagtgttcctttatcctggaagcagtctaccctgaattaacatgtgtcttaacataatgttatttcttttgatgctggggtttaaaggagacacatgaacttcctgaagccaccaagacatcatccagttttgttttgttttttaactctttgataatttaaacaaaacaccaagcagtgctgcttctgaataatgctcacggaacaatgtattttaatgtaccctctgtatttctccactctaaaggacattttagaccttttgttttagcattatcacccagctacagatctggcagagcaacatggtgtgcaattttgtgtcagtctacataattcatcaaaaataaacaagaaaaatttaagaaagcaaaagaaaattataactagtaatgagtcagtatataacataggctgaattacattatggtttgtacaaatattaaagtcgtggtttcatatttttttttaatttttgtatctactcaaaaatcaattgcaaactagaagctgactatggcttatataactggctaaaagcacaaagatatgaagggaaaatgggaaaccaaaattgacattatggaaatattgttagaacaatatagaaagaaagtgttttgaagagagatacagttatgttatataacaaggaaaggtgccctgaaatgttaacatgactgtttccattttctgtgaagatttctatctccaagtctcaagtacatcataacgggtacaactagatcctattacagaagagccttgtgtcagtgacttcagggttatctacatgacattgttcctggtttaactgaatataatagtgctgcatttattcagcatcactggataatctttaaataatgaaatcctcttcctgtaagctacaaaactttttttttcttttttaatcaggttactctaccacttaaagattaagactccacagtacttgggagtacaaaagccaaactccttgaatagcctgcaatgacttcctcacagcgtttctagcattttctctgtcttacttcaaaaataaataccccagccatgcaattgtttcacgaccctctgcctactaaaatctgccctagctcacccccttaaccaaaccaaaatgatcctaagacttcccagcctgttcagttcctctctttatttgttttccccatctcttcccttgtcatcagtttcactcttcgcttcctccaggacaatggaaacaaaatttgagcatgcatcagaatcacctgagaggcttgttgaaccacaggtggctggatcacacccccacatttctatttcactaggtcaggggtagacccaatctttgcatttctagcaagtcctcagcgcatgctgatgcccctggtcccaagattatattttgagaactccaggagatcacttttctccttttaattgctctttcaaatttccagaaggctttcaaaccagataactaatcttattagactgaacacacagctaaaaataaatgtcaactaagagagagtctaaggagatttcctctaagacaagtgagttttggtttgtggtctttgtgacatctattttggtttctcagagatcttttgcataacaccctcagtgctagcctgtgtcctgggtggttcaagctacagaatcattgatctctagatgactgagttgttattctaccatgagctatagttgttgtgaattctatcactttcaaatttttgcacagttattataaccaagcagaactcaccaatagaatgtctttgagctagtgttctcaaactttcacatgcataagaatctcctaggagatcttgttgcaaattctaattcagccagtctgggttggggtccacaggattctgcaatttttttttttttttttttttttttgagacagagtctcattctgtcacccaggctggagtgcagtggcgcgatcttggttcaccacaaccttagcctcccaggttcaaacaattctccctgcctcagcctcctgattagctgggattacaggcacgcaccatcactcctagctaatttttatatttttagtagagacggggtttcactatgttggccaggcatgcctcaatcttctgaccgcaagtgatccactcaactcggcctcccgaagtgctgggattacaggcataagccatgcagccaagattctgcatttctaatgagctcccaggtgatgctgatgctactggtccatgaaccatactttgagggaaaaaaggtattaggttgtctttggagaactccacccaaataatttttgacttagttaaaaaatagagcgtcatgaagaaactcagtagacactcaaaacaattgacacttctgcaggttaaaatcatcttttatcaaatccttgtaattgccatgtctgttactcactcatgttgtagtcatagttaggtagtatttatccacaaattcagccttgcagcaatctgtcatattcaggtgagtgccaaacaccagcaagcatctctttgagggacaacagacagttgtcaatggtcttctacaggctcactacatgttgtgtttgtatacctcaagggaatctgtttgatagcaccaaaaatagcagggctttttttttttttctcccaagataagacagtatactatgtactcctcactctgggatcaggagaccattgtcttgggttttctagaagcagagcctgaaccaaggatgtgtgtgcacataatttattaaggaggtacgttcagaagacctatgggagagagaaggaagtagaatacagaattggaaggaaccaagcaagggtgaggcctcaagaatggtagcctcaacctgatcggtgtgggggtgctctggagcacaaattgcatagcaaagttgtctggtactgggtcaaagagaccaggcttttgtgccctcttacttattagtcacagccacttggtcatgggagagttaacctgccaggcatctccagaccaggtgactcccatcagtcaagggcaattctccagggaagggtgcaactgtgagccattagctgcagctctcgtggcagctgaaggatgagggtgcaggacagtaaacaggatacgagtggagaaccaacagtgccaattgggagtgaaaatggatacaccagtggacacagattgcttaaaatgagggctcctcttcatgggcagataaacaaaccctttccataggaagtctttaggggggatatgggaattacgggctagcatggatacagagaggccacgtgagagaagcaaacagctagcctgagtcgttgctcatgacagaagaaacatgggcacatttaggacccagaagcaaatctctgggttttaaattaggtcctagtcaggaactcagcagggaggaatagggagatgtcttgggtaacttgtggactaacaatgcagtctctgttctgcaaatccttccccaggagaaagcttggcagacctgtatgcattctatggggctttcctttccagttacctttccacaggcttcactttctccaagtttgtgctctcccaagaaatcaaagaggccttctgtcctatcagatgacaaacatctcactttcttggcacctctccaagaataagcaaatgccagacttctagattttcgtaaatgaaagattccaaaacctagaaaatcctttccagggctgatgggaatatatgtatatataaaaagctgtcagttatttcttgaccccaatgtctgtgcatttcaaagttaattgcatttattttctatgtcatatctttctggttttaaacaaagttatgtaaaacaaagacaaatttagttttaaatgttctaataaggcaatattttgtccccaggataaacattctaaacatttctttgtgctaaaattgaataatgctttctagttgtggaaggtaagtacctttgggaacaaacacaatatcgtctattcaccaccttaaaattaatttaaaaaaaaaaactgtattagcaaggagtgaaagactttgtctagacagcttcctttaggcagaatgaacagcggccagtgcagctggatgttctgccctttgggatatgggcagtcatagacagctgagggttcaggaaggaaaggaggtagctagggagattctccacatcttgacagagcagtagagcaagcttcagaacatcatgcttctctggggtcccattaagatcccattaaggatccattagggtgggcagccagtacaggctgctacaatggcagactcctgtatcagtgcagctggaagctccagagagcatgttcattctgcattccagatttggacataataaatgccaaatgaaactcttggtctgctccctgaacctgctccatccacagtcctgtccaccctagtgaatagcaactccattcttctagttgccctggccaaagtaactgtggtcatctttgcctgatctctttacctcacagtccatggccaatctgttagctaatgtggttggcattccctttaaaaccagaacttcatcattctcaccaccttcactgttctcatggtcccagtcagcacgatctcttgcctgcactgttagaatatctctctgcatggccctatgatatccatccttggcccacaacattcttaagggggcagcaagagtgatccctcgaaaacacaaatcaggccaagtgtggtggctcacacctataatcacagcactttgggaggcagagtcaggaggattgcttgagcctaggagttactccctgtgtagcaacacagggagaccccatcaatacaaaaaataaaaaaaactttccgggtgtggtggcgcacacctgtggtcccatctactcaggaggctgaggcaggaggatcacttgagcctgggagttcaagagtgcaatcaacatcataccactgcactccagccagggtgacatgtgagactctgtctcttaaaaaagaaaaaagagaggggtggggctgggtgctgtggctcacacctgtaatccccgcactttgggaagccaaggcagggggatcatgaggtcaggagttcaagaccagcctggccaagatggtgaaaccccgtctctactaaaaatacaaaaattagctgggtgcagtggtaggcgcctgtaatcccagctacttgggaggctgaagcaggagaatcacttgaacccaggaggtggagtttgcagtgagccgagatggcactactgcactctagcctgggtgacagagcaagacaccatctcaaaaaaataaataaataaataaataaaaattaaaattaaaattaaaaaatttgaaaaaaacctccacaaatcagatatatcacagtcctctgttcaaaaccctccagtgaaccccatttcactcaaagtaaagccagaggttttaaaaaaacaaaagcttcccaagccctacatgttccccttccctcctcaacacaggtatactaagttaccctttttttttttttgagacagagtctcactctgtcacccaggctggaatgcaatagcactatcttggctcactgcaacctctgcctcctgggttcaagggattctcatgcctcagcctcccaagtagctgggattacaggggtacaccaccatacttggataatttttgtatttttagtagagatggggtttcaccatgttggccaggctgatctcaaacccatgacctcacgtgatctccccacctgagcctctgaaagtgctgggattacaggcacgagccactgcaccagcccaacttttaaactctttacctaacgtaactccccttgttccctccaacactggcctcttgctgtttctggaactctccaggcataatctcaccttgggacctttgcctggaacaatatttcctcccagcatggctagctcccatgcctcaggcaagtctttactggaatgtcaccttctcattgcctgatctatttaaataataatccccctgccctagcactcacactccctatcattcttctgattatttttctcctttaattcttatcaccattcaatatacagtactgaatattttactcatatatatgtttaattgtgtatgttccccagtagaatataagtgccatgagaacagtggtttgcacctgttgtgtttgcaagttgatgcccagtgcctagaacagtgcctggcatattagtggccagaggaatatgtaatggaatcttgcaatgtgtgaaacactccaccagttactgtctagactttgaccctgcaactagataattagcaaaacagacagggctttttgcttttacggggcttaaaatctacagttgtactgcccaagttagtagtactagtcacatatgactacttaaacttaaattagttaaaattaagtagaattgaaatactatttttctttttttcttttttatttgagatggagtcttgctctgtcacccagtctggaatgcagtgacgtgatcttggctcactgcaacctccgcctcctgggttcaagcgattctcctgcctcagcctcttgagtagctgggattacaggcatgcaccaccatgcctggctaatttttatacttttggtagagatggggtttcaccatgttggtcaggtgggtctcaaactccagacctcaagtggtccgcctgccttggcgtcccaaagtgctgagagtacaggcgtgagccactgggccccgcccagataccattttccaatcacacaaaccacatttcaacagtctcattggcaactggcttccatgatgaacagcccagaggcggagcatttccaacatcacaggcagttctgttggatagtgctgacagacatggagggttcctctactccaattccctcttttataggtgaggaaaccaaagctcaaggaaatagtgacttgactaagatcacacagctagtcaataacaaatctagtatgaaacccaattcttccgattccatgtgtagataaaccaatgtgtagataaacacatgctgaagtgctatctacttctttaagacaaatcaaaatatgaaacaagtaaataaaacagacaaaaagccctccctttgccttattggaatgaatataatcaactatagaaacagaaaggaagaatgtattaagtgggtattctctctttttccctgctattgtctgaattcttcttatttgggagatatttcctgctttatgaggcttggtaaaatgtagagcttaactcctttttagacgctggaaaaaaaaaaatgaatagctttccctccttatgtggtggctgagtcatggtgaataggcttggttaatcagatgctcctacttggaactgaagccgccattgcaaaattataactgagacagtgaaacagatctgacctaaccaactccatcttgcttctaacctccaggctctccttgtttgttctgggcgtaggctgaactaacgttgggaggaacttagtttataatttgaaacaaagaatctaacagccctttcccaaagcaaacctccttctggcctagagactagactgtctttgtaggactaacaaattagccacaagattagaaattatggtttaggagtcatgcagctgaaggttattttattttatttatttttgagatggagtctctgtcacccaggctggagtgcagtgatctcagctcacttcaacctctgcctcccaggttccagcgattctcctgtccccagtagctgggattacaggcgtgtgtgccaccatgccaggctaatttttgtatgtttaagtagagatggggtttcgccattttggtcaggctggtcttgaactcctgacctcaagtgatccacccaccttggcttcccaagaattactttttctctattggaattcccctgttttggtaaatcttctctgtctaggcagcaggcaaggtgagcccactggggagttacagaacttttcatgggaagctatgaagacaaaaaaaggaatgtagcagccgcttaggttctcaggtgactgcaactgcatacagtgaacaggccacagactcagattcgccttgtttcctgtgcattttcaaatccgaactatctatcctgcctaccatttgtgtgagctatctgctattcctaaatgtttttttcagctcaaatcagccagtgttgaattcagttgcctgcagctcaagtccctgactgatacagtgtaccaatcaaattaaaatgcatttgacttttatttaatttatttaaaaaggtttatttggttcatgattctgatatttggaatgttcaagattggtcattttcgtctggtgagggcctcaggctgtttccactcttggtggaaggtgaaggggagatggtgagtacagagagagaggaagcaaaggctaatatgcatttgattttggaggcaagaaaactcatctttttccctcacccctcctaggttttctgactggggctctgttaattagactgacaaaagtcagattaacagaagaaaaacaaacagaagtttattaacatgtgcatcacacatacacatggaagcactcagtaactcgaggtcggtcattagaacaataaatttatagagaagtgataagacaaaggaaaaggactttgagtttttagggtggcaaattgtaggaaggtaaatttatggggaaactagtggtagataagagctagttttagcaacgtctgttacctgtatttctctggcaccacctaaggtgtcagaagaacttcagctcttcctggtagagatgggaggggatacgcctttaaaaattaatgtcctgcaaataggggaagggcagatacttttcttctatctgctatttctcaattgccttcggttcaaaataatccttatgccaaagtggcatattttagggtggcatattccgatacctttcaattttaaatgaatgtttcctggtgtttttgtttatattgaaccttgaacatcaggccatcattctggcttatatggaaaatataattcataaccgaacaccagcagtagaagatagattgcttgaagacttgagcttcttatttattcagcagaattggctgtttcgattgatcgtgcattcagtgattaagaagagcaaaacgtaaacatttccagatttatggtcactctagctttgtacaacccttgaaaaagaaaatgcttggaaaactgaggcttaaagtgctgtgatacttctgaagttccgatgataaatatttttttgtgatttgtataaagttagacatcagtaactgtgtttagtcattctcatctactcaggaaatctgtctggaaggaaaaagcagtgagccatggtgagctagtgagagaattttccaagtttgagaatgtcaacaaagtaaaattgttcatgtgtgcttagcaatagaatagtctagcacttgaatttaccgaatttaatttctattcccaaaatgattaggtatttaattttttttctaaaactaaagagacattttttaagttttttctaaaactgtattaaccaccttgacccaattgatatttatagaccgtcttacccaatcactgcaaaacgcacattcttttcaagtgcgagcagtgggagcagcaggttcccgagtatagaccaagtgctggggcatagaaaacctctcatttcaaccagctgaaatactactgggtatgttccctgcacatgatggagttagattaataacatatggcggaaaacttcaaatctttggaaattaacacacttataaataacccatggctcatgggttttaatatcgcagagggcatttaaaaatatttctaacagaatgataaaaataaaggaaaggaattcaagtgtaagaattttctaatatcatatatctcaagataataacaatgattaaaatatacctaagatttgcatagcactttacagtttacatatattctgacattttatcttaacaaccactgtagagatgacgttaatatacatggatgtcactccagtccagagcagtacattaaacatctctacacttttaaggaatgactaagaggcctgtcaggctgctggtcaaccccctgggagcatgatcttgcccttctacgctggcttccagccttgtcccatgctctcccccaatcagtcctccccctttctgtgcctgagcccgttctgttacttcccttgcaatgcataatgatattcaagaacatttgtgcatgaacttgtatgtctacctagctgttggatagtttaaacaaaggttagctatccctaccctctcctcctcactaaataggctagcacacatgcaggccttctcagtgcaagtccagtgcttcttcatgacaggaaaaccttgctattcgaacacattttgtactgagaaatttaattccacttaaagtagtgaccaaaatttcataggaagtagtgaaaaaatgatttaatattgaaataagcctgatatatgaaagagaaaaaattatgaatttaagtttattttattttatatacatttttaaaaattgggtgaaaataatagttttacactagttgctagaccaaacagcaagtaaatcaaatgccggcttttgtgtataagtagtatacgtgtaattatgaacatatacaggagatataatgtttttcacgtcataaatgatttctgtagcatgatcataagaagggcaaatatttaaaaataaatttgaaggcttcgctagccttcccaatggttcctcttaacttttgatattaaattattcaactctaaagtacatatttgatcaaaattctggcgtctcacttttcttcttcacttgttaatcctttcaactttgtctttatcagattttggggaagagttgggaagtatggttcaaaaagttcactaatttcatgtttattaacagcataaaatctagcatcttttacaagacgtataattttctggccgggcacagtggctcatgcctgtaaccccagcactttgggaggctgaggcgggtggatcacctgaggtcaggagttcgagaccagcctggccaacatggcaaagccccatctctactaaaaatacaaaaattagccaggcctggtggtgtgtgcctgtaatcccagcaactcaggaggctgaaacaggagaattgcttgaaccaaggaggaggaagttgcagcgagtagagatcacgccattgtgctccagcctggtcaacagagcaagactccatctcaaaaaaaaaaaaattatacttttctttggcaattgtttgtaatatatttacattatactattaaatgtcatccatcagatgatttcaaattaattttatatatgctcatagtgacctctgtaacagtaggcagatgaatcattaatatttagaaaacaaagatctcttccccctttactgcaactacctcaacaagaaacattcaatatagaagaaaagtgtgttttaattaaattttatattattaaatgagtgccattttaggagttatgcaaggaaacatgttacagctaaaactgcttgttcttctctttttcttgggcacacacttcaactacccttcccagccctcttgcaatttggtggagccatgtgaaaagttctcctaatgggatgtgagcagagtgatgtaggccatttccaggctaaggtagagaagaactgtgactatcatctacatcgtcttgcttccctatctgccagccaaatgcaaaggatctagtagaggaccgcaagaccctagagaatggtggttctctctcttaagaaataaatctctagtaggttaagatattgagattttagagttttttgttatagcttggtatagcaaggtacctctgttaatccatcttgaatagcatattgcatgagttcattacacagaattattgtgtctatgtaggattactgctgaatgggataaatttgtcctcgaatttgaaagattttgagcagttataataattccattgaacaaaaatttattgagtgcttattctatgtttagcagtacattgaacattgcagagggtgtctggagagaagatgctgaagggaaggataaattgttatctaatcccacttctcaccacctcaccaccaatatgtctttcctggaccattgctggtacctactcactgctcttcccaaaaccacgccagcctaaatgcgatccatcttctaaatcacgccacagtgttttttccaaagctccaatctgatggtgtaatactcagtttaaaatcctcaagagctcaatcacccccaactccacctttgcttttgagataaagttcaatataaatcaggaaccctgagcaaaaacctatagatagatatagtttatatatatatataatatacacaaacacatatattatgtacatgtttatatatataaaaacactacatatataaattatagtaatgccagctgctataacaaataaacccaacatttcagtaacttaacactgtaaaaatttattggctctcatgcaaagtccagtttaagtgtctatgactgtgggagctccatgcagtcattcaggggctcatgctgatggaggctctgccatttctgacaggtggctttggaggttgccccagatgttgacatttagatggtgcacaaagaaagagtgtggagaatcacacatgggaaatcagtatggacaaggcctgaaaatgggccacttgacttttgtgaacctttcattggctacatttcactcaggtgactgcacataacttaaaaggagactgggaaaacaggccatctatagcccacatgaaagaggaaatggattgctgaatatttagccatctcttctggttttcaaacatttgttctttttctcatgctccctccccaagggagacaactcaaagccttacccagtcactatgctcagctcaactgcaagatcacaggaggtgggagagaccaccccacccccatgtggcttatgatagtccaaagacctataatttaaaaagataaattatctgcaaaccctcacaatacacaatacacagtgatccagtagagaccaaagaaacctcccattcataaaagggaatactgcgagatgcacaactagcaaatttgaaatcctgctacacacacattgtgaacagctttccccatgagtacccttggggttgtggggactttcttgctagaccctgattctagcaagaagcagcttccttcttcattttcctcatgccctagatctgcactcaaggagtctctttcttgtccataaacctctatggccatatctggggagactatatcttccttgggcgatacacagtttttgcaaccagattctagctgcaaatttcagatctctgatggctgtattgtggtgttttggtttcattcattcttaacacatttattaggcatatattctgtgtgaagctccatctaggtattgggtacagtggtttaagaagacaaacaaggtcccttttttcatgtatcttacattctaggtaaggaaacagactggaagttgttttaaagttcaaacaatccaaacgttttcagtcctggctcacagtttctttggcaattcaagcgcttcaaaaatgtagtacactcacgtcattacatagttctgatcctaaacatagttctcaaatctgttttttgttagtttgtattctaggcccaacgtctttctttttagctaagggcaactactttgaggacatatggaacagactcaggtagtaagaaggtcaaggcggtttatctgatctttgtatctggctgaataactgttcgattacggaaatttcctggaacattgtcaaagttctttcagtttcgtctaccactatgtgagagtccagccccataacagggatccttttgatttcctttcatattgacttgaaaaccagccatttcttgtttaagcctattgtgatcatctaatatcttgctaaacgccatctgtagtggccaaaatgctgacttttccatccacttttcccagagcagtagttctcacaattaggtccccagaccaacagcatctgtatcacctggaaagctgttagaaatgaaaatccggctgggtgtggtggctcaagcctgtaactccaacactttgggaggccaaggtgggtggattgcttgagctcaagagtttgagaccagcatggacagcatagtgagatcctccatctctactaaacaaatacgaaaattagccaggtacagtggcacacacctgtagttccaggtacttgggaggctgaggcaggagaatcacttgagcctgagaggtggaagttgcagtgagccgagatcgcaccattgcataccagcctgggtgatgggaatgaaaaggaaaacaaaaaaagagaaatgaaaatccacagtccagacctattgaatcagacactcagggtgtggtacccaggaatttgtgtatttataagccttccagatgagtctcatgcatactaatgctaagaaccattgctccagagcagggagtatatgtttgtgggtagaataacacaaaaacatacagagaaagtggggcaaccaaccattaggttaaggtgattaaatatcgggatattttcagacatagagaaagtcagtacgtttcttcccctgaacaaatttttaggtaacgatcataggccctttaaggataagcttatttttctttctttttaacttttatttaagttcaggggtacgtgtgcaggtttgttacataggtaaacttgtgtcgtggggatccgtggtacagattatttcattaccgataccgattagttatttttcctgatcctctccctcttccttccttgtactctctgataggccccagggtgtgttgtttctttctacgtgtttgtgtgttctcatcatttacctcccacttctaagtggcggtatttggttttctgatcctatgttagtttgctaaggataatggcctctagctccatccacgtccctgcaaaggacatgatcttgttcttttttatggctgcataatattctatggtgcatatgtactacattttctttgtccagtctatcattgatgggcatttaggttgattccatgtctttgctattgtgaatagtgctgcaatgaacatatgcgtgcatgtgtctttataacagaacaatttatattcctttgggtatatacacagtaatgggattgctgggtagaatgatcacctcattttgagtcctgaatcagccatctcatacattaggtccaaactcaccctttgtagtgacccaagccaataaggtccctctatgctcaaacaaatttgagttgagtcctgacatagataaccttggtcaactgcttgacttctttactgatgcagcttagcattaattcctaaacattcttctatatctctgctagagtagaaagagagagggaagagagatttctttcagtatgaagcagtaaatctttctcatactttgctttttgtacattgctttatggtttaaaaacacatgcatttgaagtacagataaatcaaaacagaaaatggaaacataagaaactccattttaagaaatcaccatctactgtgtcattaagtcttataaaaatttttctgccattgataattttggtgtctcacccagacacccagttgatgtaaatgttggctgttcatagttcatagatgtatccttctctggagagctgtccttggctgtgggagccgcctcacccacaatgccctgggaaatggtggcttctcctacaaagagcccccagttagtagccaatatggtgaatttttaaaagcccagcccccttgctttaagggaagacagctctgtggtgctgctcttgctccagagctccctgcaggaacaggctgaggctaccctttagctgaaagtgatcctatctggtttctttctggtgctatctgagttgttcctgagaacatctcagatttcgcctctacagaatcctagctaaggcatcatcattagcgccttcatactctatattcatcttttcatttttattcctactgaaactactctcagcattctatctctcatggtgagagttagctagagttagctctagcctttcctgtatagaatagtcagttttagcatttacatccctactaaaaatgcttttgaagaacttggcggctgggcatggtggctcatggctgtaatcccaacactttgggaggctgaggtgggtggatcactttgagcccaggagtttgagaccagcctggccaacatggcaaaaccccatctctacaaacaatacaaaaattagccaggcatggtggtgtgcacctgtagtcccagctaatcaggacgctaaggtgggaggatcagttgagctcgggaggttgaggctacagtgagccatgattatgtcagcctgtgtgacataggttgtctcaaaaaaaaaaaaaaaatacaaaaacaaacttggctctgcttaaaggtttctgtaaaaccctcctgaatactcacctctatctcccacacacccccagattttaagcattctgctttgaccctcacaatgttctgctttatagtagttagccttttgcaagcctgtcttatttgagaagagtttgtgtatctttcatccatgtgtccctaaagcatttttcaaaattttcccctcaggatgcacaccaataaatgcactggtgaggatatcttagctacagccttagagccctttaaatgccccctgcttggctgggcttggtgactcatgcctgtaatcctagccctctggggagaattacttcaggccagtagttggagaccagcctgggaaacatagcgagatgctgtctctacaaaaaatttcaaaatcagccagacgtggtgacacatacctatagtcccagctagctacttgggaggctgaagcaggaggaccacttgagcccaggagtttgaggctgcagatcacgccactgcactccagcctggacatcagagtgagacactgtctctaaaaataaaaataaaaataaataaataaataagcaaatccccctggtgcacagcagggctggcacaacagcctagagcagaacagaaggatgaggagagattaattcaccccaagtgactatggagattgtggaagcaaaggggacagggaaaggggtaaattgaagggaagcccagatttgcatgagtgtaacaatatattcataaacagagaaggctttgattgtatgggaagaggggaggcaggtcttttcctgggccaatcagatagtaggaatgtggtggtggtaggtatagctgctggtgtacttattatatagtcataatgcactaaggtcccagtcagggtaaggttctagataaaaggcgctatgatctcaaggcaggtggggccagctggagacaagaggtactggcatggctccctatcttatttttccatgagttttcaaggtcaatacaaggtgggagaccactctccataagaggatgtcattctgtgttgtaactcataaaaagaatatgtcattagtgtgtataacttctacttgtgtctgaacttccccttttcccaacaagcaggggcaagaggtccctcccgcatattcctagtagtgattaatcagggaactggcattttggacacatgggctgggcaatttggcatcttttttttttttttttttgagacagagtttcactcttgttacccaggctggagtgtgatggtgcaatctcagctcactgcaacctctgcctcccgagttaagcgattctcctgcctcagcctcccaagtagctgggattacaggcgtgcaccaccacacctggctaattttgtatttttagtagagacggggtttcaccattttggtcaggctggtcttgaactcccaacctcaggtgatctgcctgccttggcctcccaaagtgctgggattacaggcatgagtcaccacacccggcccactttttaaaatcctatcttgacttggaagtatatttcttcacagccatgcctttgattataagttacatcattacattattttatgtacagtagccctcttattcatgatttcagtttcagttacctatgttaaaccatgatccaaaaatattaaaggaaaatttccagaaataaaaatgtataagttttaaatttcacaccattttgagtagtgtgatgaaatttctgcctatcctactccatcatgcccaagacatgaatcattcctttgtccagtgtatccatactgtacatgctacctgcccattggtcacttagaagccgtctcaattatcacatcaactgtggaggtatcacagtgcttttgttcaagtcactcttattttacttaataatgacctgaaagcacaagagtagtgaggctgacatattgttataattgttatattttattactaattattgtttttaatcttactgtgcctgatttacaaattaaactttatcatagctatgtatgtttagaaaacaacatactatatacagaattcagtattatccatgactttcaggggtcctggaacatattccctgtggataagcaggaactactgtatccttaagggaaaagaaatgtgggcggtgagattttatgacatcattgttgttagtacattctaatttcatagctattaaaatgtgacaatatatatcttacaaccaatataatgcagaaatatctagactttggttaagaactccagctttggaaactaattttgattcaaggttcaaattttggctctgccatttattagttgagtgatcttgcaaaatttacctcatttttcagaatgaaatagaaaattgtgagcctttaaaatcacagggccattgagagtattggatgagtcaatacaggcaggacgctcaccatagtggacaacggcgcatagtaagagagggtgaagacattttggttgccaatccaacagcctttcttttctctcttcctcattaactgaatgccaatgttatttacctgcttcagaggaacagcctgttaaaaagtccaggtttctcctaaacacagagggagaaatcataatttgtgtaagccaatcagagttgttttatctcttgtcaagtgattggtttagacattagtatgtgatgtaattttggccaatgggatatgatgggaagtgtcttgtgaggactttaatagagggatgcatcatgggaatattttggaagttgtcatctgcataggattgccatcttggtgctatgaaggtgcaacacaaccattatgacagaacagaaacaaagaagcccttggattcttttttttttttttttttttttttggtataacagccattttttttttttttttttagacagagttttgcttatgttgcccaggctggagtgcagtggcgtgatcttggctcacctcaacctccacctcccgggttcaagcaattctcctgcttcagcctcccaagtagctgggattacaggcatgcaccaccatgcctggctaatttttgtatttttagtagagacggggtttctccatgttggtcaggctggccttgaactcccagactcagttgatccgccctcctcagcctcccaaagtgctgagattacaggtgtgagccaccacacccagcctgcccttggattcttgagagatactaatgaaccactgggaaccatacctgtaatctccttcctctaggcttcttgcacaataagtagtgaaagacatcattaaagcaacttcagttgaattttctattatttgttgcaaaaaaggcttgaaactgatgcagtgtttagtggctatgagctcctaactatttctgctactgttgttagtgcttactttaccatctgttcctaagtttcctcatctaacacgtggggaataaaaagatatttgcttttgaaaattgtcaataggatggatgagataatgcatatagagagcttagtccattggctagcccaaagaaagcatttaatgaagtgtagcttttcctcctattattattttgttgttttagtgccactatttaggacaatgttgtggaatgtattattttttcacaaccctatcttttctctgaggtcacttttaacagaatatacttttatattctgttaaattcacttttaacagaatatactattctacaacttactgactttgggcttggccatgtgtcttgctttggtcaatggagtgtgagaagatataatctataccttggctgtccaaaggttttgaatgtgctcgtatagttctgcttgctctcttgtatttctgccattttccttgaggagaacatgtgccaagtagtctctatttcttcatcctgggcccttgaatgagaggcatatggagaagatctaaatccaatctgtagcctgaagcagagctggctcagctaacctacagttgacggtccaggaagctgctgcgggaaaagaatctcaacagaaacataaattttcctttgagtcactgagacttgggaattgtttgttatatagctattactgccatgaaaaaaaatacttgactaatacagtcaaaaaaagagaaaatacaaattgagcttcagagtcttccccaaatttattgcttggtccagggagacttgtgacatctgggataggtcctgaaacagtagaagagctgatcggaccagtggattctgggccctgctgatgatcttctaagaggtgaaaggctcaggctactaaagagaactcctctttgcataatttaactgacatgtatgggccagattcttcctacttgatgtttcttcagggctcccactgatggtaattgagacacagttggctaagattggcttgggaggaggggaatagtttggacaccatcagaggcatcttttgattaagctgtgtagaacgtaaattacttcgagggaagtgagtttaagaaactggaactagagccagtgcagaggatagaaggaagtcggctggtgagaaacaggaatgggagactaggacaagaagaaccaaagctacaaagcatgagaaagacagaagagcaagcagccagatgctccataatcgcacattggaaaaaatccagagccgagtactgagtggaggtcagttctggaaaataggtaaggccaggagtgcagcaaaaacaaaacaaacaaacaaacaaaacaacaacaacaacaagaagcgtttgtcagggtcaaagccatggcccatttgttttaagccactgaggctggataaaacctacttttgagtaagtactggagccaagaaattgggtggatggatcgttagtgtcccaggtgtcacaggacaatgagactcttcactctggttatctggctgctacccccatacctctgggactccatttcggaatttcttatcctggttctctgaaaaactaagcctgccttaagcctcaaagtcgcagtggagtccatggttcctggcactgctgtctgcttgtctggatgtctgcacattggctattaccagattcctctcctgtctgccaggactcccagtggcttcctcttgctgggcctcccctacactcacctttggaggagctaggcccctgacttccacctgccaccaagccttcccccaccatgctccacctcccactttgctgtggctcacccaggagcatccacaatgttcagcctggtcctcagtttctgactgttcctcccaggtcttgctgtgctccactgcccaaggtctggcatacatgtgggctggagaaatgcttatagcctccttgggtgaccttctttacttaaatttctgatccctgaaattatccttttatagatatggtcctttggttcacattaaaatataaattccctgtgggagagaccctattaagccttgcagggaattgctaatttacatcttaatgtgaatgaggttattggattttttccccccttaaagcaatccttgatggaggtagggggaaaatagagaaaccatgattatcagataataattaaaaaatggctacagagacagggaaaggaaacaaaagaggaaatttgggttcatggctttttgtaaggcgttcagtgtggataattgttccagatgcttcttttgaccttgatgggtaaaggttttgttttgttatgctttgtcttatttgaaatttaactcttactgcattatttctatatggagtgatgcaaagcaaaaggattaatggtaaatataaatgtgcccttaaaatgaaaatcggtctgcatagggaagatgcataggatgatagatataaatgaatcacaaaactgtctgactattgtgtaggctgtagctaaagcaacccaagaaagtagatttctctaaggagactgatctctctgctgtgatatgacagtgggtatggtcctaagtgtgcattttcagaaactcagttttgctggcacatgcaaatagatcagcctcaaaggattgactcatagctctcaagctcacaagagtatgatgagagacctttctagcttgcataatattattttatacattgtcagtgcaccttctcctagtatcaggatcattgggaagccaattcagtagcaagatggcagtctgctggaaatgagtgtgaaccactttatttctcattctcaaaacaatccacaagctagttattttcattatctccctgttgcagatgggtaaatgaggctccaagaatttatgtgtttaccccaagtcatcaggctagaaaggcctgagctggatttagacccaggcaagtgagtcagtaaaacaaaactatgtggtcttgggctacatggaagaactgagggaggtagccattatcaccatgtggctcctgagcgcttgaaatatgactagtatgactaaagaactaaagctcaagttgtatttatttctaatacatttaatttaaatagtcatctatagctagtgacttctacactggacaggatacctctagatgcctgcttagagaaatccaaaagtggagagagattttttttttataagaagcctttgtcatacaacatccatgaatcttaaatattattgtccccacttttgagatgagagcactgatattcagagagaataattgatttgcccaagattttacagctgggagaagaatctaggtcaaagacaccaaaaccccaactttttcaaagaatctggactgctccataatgcatgtaaccatgcgcctatagttggacatttaggttcatttcaatttatttttcagaattcatctttcactgaaatgaatatttcagtatataagtaattgtccctgaaatgaattatatattttgaagagtctactctaagtgaatttatagtgacagagtatataagtattacaaataatttccaggaatatttacacttcccttagccaggctacagtgtttgtttcatctgctgtaagtgtggtcatttaaggaggcctttgctaattcagtcattgaaagatattatattgttttagatttttatatttattaattaccataagtgaagctggacatttttctcttatttcttctgtaaattagctgttcctgaccttttttgagaccataacatttttttcccattgaggcctcctaggtggattatagatcttcaaaagctacaaactgtcagaaaagtgtatttgggataaatcagacctctccttcggctgttttcttcttgtattcagaggaataactttttaaaaggagtcactttggaaggttgaatggccagctgcccaaatgtgcaggaaccgttaacaattttactattcctaggcttctaagaacaaggaagttcttaagaagcttgtgggtatacaaaatgaaaaccgaatgataataataaattaatgatcagtgattctatgacatcatgattaaaaatgagctcccctacacttttacgctgctggtgggaatgcaatttaggtttccatagcggtacaaccactatggaaaacagtgtggagattccttaaagatctaaaagctgaactaccattccatccagcaatcccactactgggtatctactcaaaggaaaagaagtcattatatggaaaaaacacacgtacatacgtatttatagcagcacgatttgcaattgcaaagatatggaaccaacctaagtgcccatcaaccaaggagtggataaagaaaatttggtacatacacaccatggaatactactcaatactactcataaaaaggaacaaaataatgtcttttgcagcaacttggatggaatctggaggccattattctaaatgaagtaactcaggaatggaaaaccaaatatggtatgttctcacttatcagtgagggctaagctaggaggatacaaaggcataagaatgatgcaatggactttggagactcagggtgggggaaaggctgggagtggggtgagggataaaagactacatcctgggtacagtgtacactgcttgggtaacaggtgtactaaaatctcagaaattaccaatgaagaacttatccacataaccaaaaaccacctttacctcccaaaactattgaaataaatatttttaaaaaatttaaataaactatgttagtatattttgtaacccaagaattatctccgataggtctcaatcaatttagaagtttattttgccaaggttaaggacaatgtctgagagaaaaacaaacgacaacaacaacaacaacaaatcagggaaacccagaaactgtctagggtccgtgcctttttccaaagatgactttgagggcttcaatatataaaagggaaaagtgggctggaagggaaagagggaaggtagcatcatccacatatttcaagagaaaagcagccggtggaggtatcatcaattatgcatttgccttgtgctcagtgaatgggcactttacgtaagataaggtgaacagagtcgctacctatggagatattttacctgtagctaactgcttaagaacaaaaggaaaggcaggttcttgcatgactcagctttccgtttaattttttcctgttggcatagtgaattgaggtcctgagcttttaattcctctcacaattaaatgtgtatttagatccttaactccttagcagatcaacctgggaacagagaaatttagtagcttaaaagacgctgccacttgaagatgaataaggcagaagataaaacagctctaaagaaaagatatgatttgacagtaaaaaagaaattcaaatttcataaaatgtcaggaatatatcactaagtgagttacacctatgcattgaaatttgatgatgacggtaggtgtggggttaagagctaattagtgaatcttaagtaatcattatctgtaaaatgaaaagcaataagaaactggaaaagttagtctttttccatttgcttctcaattgtatcaacatgaagtattagtttgggccccactggtcatcaccttgctcaaacttgtttctttttttcaagaataaatgctgtctggccaggtgcagtggctcacacctgtaattccagcactttgggaggccaaggcgggcagatcacctgaggtccggagttcgagaccagcctggccaacatggcgaaaccccgcttctactaaaaatacaaaaattagtcaggcgtggtggtgggcacctgtaattccagctgctcaggaggctgaggtaggagaatcgcttaaacccaggaggcggaggttacagtgagctgagatcttaccactgcgctccagcctgggtgacagagtgagagtccgtctcaaaaaaaaaaataaataaataaataaattctgtttatttaaatttcatttcatttatcatgggtttctctgcattcatttttattttttaattacagcagtccccttttatcagcaatttcactttcctcggtttcagttacccttggtcaaccacagtttgaaaatattacattattttggagagagaaagagacagagggacaggaagagaccacattcacataacatctatggcagtatatttttacagttgttctattttattattgttgttgttaatttcttaacaacaatctgtgcctaatttataaattaaactttttcataagtatgtatgtctagaataaaatcatagcatatatagggttcagtactatctgcagtttcaggtattcattggaggtcttgtaggggggactgctatattgcattaaagcattagtcattttgattactgagtgttttggcagctctgtaaattttgtgtctcgggcaaatgcctcacttgccctagtcctggccattccctgggtgggaaacatttcttgatcagcaacctgtccatgggatctgtgaactctgacctctgaagcttcttcctattccatcatccttttcagccacatttgaaattgacatttgggaaaagactctcctcaggttgctttatacctgaaatagtcacaggtttatctgatcttagcaattcttcccccaaacctagcaggcttatgacctaattgcctgcaatccgttccatgtgaccaatgaccaaaatcaaggtcttggttattattctgaagccctatttgcttcactgactcagatgccatgtctcattttcaacttaatggggcttaccttatgggtatgggggttcagtaagaaggctacccacttactcttatctttgccttgagtcattttatccaactgaacagttttactcaaaaccatacccctaggcactgaaaagttttactcaaaaccatacctctaggccgggtgtggtggctcacgcctgtaatcccagcactttgggaggccgaggtgggtggatcacctgaggtcaggaattcaagaccatcctgcacaacatggtgaaaccttgtctctactaaaaatacaaaaattagctgggtgaggtagcatgcatctgtaatcttacctactcaggagactgagacatgagagttgcttcaaccctggaggtggaggttgcagtgagccaagatcatcgcgccactgcactccagcctgggtgacagagtgaaacttcatctgaaaaaaaaacaaaaaacatacccttagtctgtttgccttgatgtcttttaatcaactgaaagtttatcctgctattttgttacatcaatcttttattttttttaattccatctctttctttaggaactggaagcagagggctttaccaaaattacgaggtcctgaatttctagaatctccgtttcctctcatttttacttgcaagttggcaattgtttcttgagctcattgctttcttgtagcacctgcgccaaatgcagccaactgcaatcaactcctgaagttttcatcctcttctccaagagctaccagtttattaggctcatacgactcctgtgttatacagaaaatggctgtgaaagatattcccatcctaatccctggaacctgtgaatatgttattttacatggcaaaagggaattaaggccaggcacggtggctcacacctgtaatcccagcagttttggaggaaggggcgggtggatagtctgaggtcaggagttcgagaccatcctggccaacatggcaagacccctgcctctactaaaaatacaaaagaaaattagctgggcatggtggtgcacacctgtagtcccagctgcttgggaggctgaggcaggagaatcacttcaacctgggaggcggatgttgcagtgagccaagattgcactactgcactccagcttgggcaacagagcgagactccgactcaaaaaaaaaaaaaaaaaaaaaaaggtggcagggcggggagggggggaattaaggctgtggacagattaaggtggctgatcagctaaccttaaaatagggaaattatctaggtggtcccaatctaatggcatgagttatttaagagcagaggcgtaaaagtcagagggattccacacagaaagggtaagtcagagaaaacaacataaaaagaatacacaggcacgcctcaaagatattgtggatttgactctagaccggcagtccccaacttttttggcaccagagaccggtttcgtggaagacagtttttcctcagacccaggcagtggaagagctgggatggttttgggatgattcaagcacataacatttattttgtactttatttctattattattacactgtaatatataatgaaataattatgcaactcaccttaatatagaatcagtgggagccctgaacttgttttcctacaactagacagtcccatctggggggtaatgggagacagtgacagatcatcagacattagattctcataaggagtgcacaacctagatccctcccatgagtagctcacaatagggttcgcactcctgtgagaatctaatgccacggctgatctgacaagaggtggagctcaggcagtaatgctcctttgcctgcagctcaccgcctgctgtgcagcctggttcctaacagttcctaagatatcagttggtggctcctggggttggggacccctgctctagaccaccacaataaaacaaatatcacaataaattgagtcacgcaaatttttaaatttctcagtgcatataaaatttgtacacaacactgtagtctattaagttcacaaaagaattatgtctgaaaaaatgtacatactttaattaaaaatactttattggtaaaaatactaatgattattggaatcttctgagacccataatctttttgctggtggagagtcttgcctcaatgtggatggctgctgattgatcaggttggtagttgctgaaggaaggctgtggtggctgtggcaattttaaaacaaaatacaacaatgaaatctgcctcattgattgattcttccctcacaaatgttttatgtgaggaggcaacgctacttgttagcattttacccacagtagaacttcctgtaagaattggagtcaatccaaaggtctaatatccagcatctacaaggaacttaaacaaatttacaagaaaaaaacaaacaaccccattaaaaagtgggcaaaggacatgaacagacacttctcaaaagaagacatttatgtggccaacaaacatatgaaaaaagctcaacatcactgatcattagagaaatgcaaatcaaaaccacaatgagattttcataatcatcagtcagaatggcaattattaaaaagtcaaggaacaacagatgctggtgaggctgtggagaaataggaatgcttttacactgttggtgggaatgtaaattagttcaaccattgtggaagacagtatggcaattcttcaagtatctagaacaagatatatcatttgaccctgaaatctcattactgagtgtatacccaaaggaacataaatcattctattatagacacatgcacacatatgttcactgcagcaccattccacaatagcaaagacatggaatcaacccaaatgcccatcaatgatagattggataaagaaaatgtggtacatatacaccatggaatactatgcagccataaaaaggaatgaggtcgtgtcctttgcagaggcatggatggagctggaagccataattctcagcaaactaacacagaagcagaaaaccaaacaccacatgtttccacttataagtaggagctgaacaatgaaaacacattgacacagggagagaaacaacatgcactggggcctgtcaaggggccagtgggagggagagcatcaggatacacagttaatggataggttgatagtgcagcaaactattactgcacacatttacctacgtagcaaatcctgcacgtgtatcccgtgcagcccgtgtgaacagatgtgctgttgtctaggctttgttgtttcacttacagagcacagggagagatttaacataattcttttttttttttttgagatggagtctcgctctgttgcccaggctggagtgcagtggtgtgatcttggctcactgcaagctccacttcccaggttaaagccattctcctgcctcagcctcccgagtagctgggactacaggcacccgccaccacatccagctaatttttcgtatttttagtagagacggggtttcactgtgttggccaggatggtctcaatctcttgacctcgtgatctgccggcctcgacctcccagagtgatgggattacatgtgtgagccaccgtgcctggtccataattcttaaaagcccttaaaagccgtaggatatgcaaatcctgcatatcctgcatatgtatcccagaacttaaaattaaattaaaaaaaaaaaactgcagtcaatcctctcaaccctgccactgctttatcaactgactttatggaatattctaaatcctttgttgtcattccaacaatgttcacagcatcttcatctgcagtagatttcatctcaaggaaatactttttgtgctcatccgtaagaagcaactgcttatctgttcaagtttcatcatgagattgcagcaattcagtcatatctttgggaaccacttctaattccagctttcttgctgtttccatcagatctgcagggacttcttccaatgaagtcttaaaccctcagtcattcataaaggtcggaatgaacttcttccaaactcctgtgaatgttgatatttttacctcttcccatgaatcacagatgttcttaatggcatctagaatggcaaatccttttcaaaaggttttcaatttactttacccatattcatcagaggaatcactaattatggcagctgtagccttacaaaatgtatttcttaaataataagacatgaaagttgaaatgactccttgatccctgggctgcagattagatgttgcattaacaggcatgaaaacaatattaatctctttgtacatccccatcagagctcttgggtgaccaggtgcactgtcaatgagtagcaatattttgagaggaatctttttttctaaacagtgggtctcaacagtgggctcaaaatattcagtacaccatgctgtgaacagatgtgctgtttgtctaggctttgttgtttcatttacagagcacagggagagatttaacataattcttttttttttttttgagatggagtctcgctctgttgcccaggctggagtgcagtggtgtgatcttggctcactgcaagctccgcctcccaggttaatgccattcttatgcctcagcctcccgagtagctggggactacaggcacccgccaccacacccggctaattttttgtatttttagtagagatggggtttcaccatgttggccaggatggtctcaatctcctgacctcatgatctgcctgcctcgacctcccagagtgatgggattacaggcatgagccactgcacctggtccataattcttaaaagccctagtattttgttttgttttgttctgagacagagtcttgctctgtcacccaggctggagtgcagtggtgtgatttcggctcactgcaacctctgccttccatgttcaagcaattcttctgcctcagcctcctgagtagctgagactacaggcacacccagctaatttttgtatttttagtagagatggggttttgccatgttggccaggctagtctcgaactcctgaccgcagatgatccacccacttcggcttcccaaagtgccgggattacagcagtgagccaccacgcctggcctagccctaggatttttgaaatggtaaataaacattggcttcaacttaatgtcacctgctgcattaacttcaaattttgcagcttcttcacctctctgtcataggatgaagagaattagggccttgctctgggttaggttttggcttaaggggaatatttgggctggtttgatcttctgtccagaccacacaaactttctccctatcagcaataaggctgttttggtttcttaacatttgtgtgttcgctggaatagcacttttaatttctttcaaaaatttttcctttgcattcacaacttagctaactgtttggtgcaagaggcctcactttcagcctatctctgcttttgacatgcctacctcactcagcttcatcatttctagttttatatcaaatgtgacagacatgtgacccttcccttcaccttgaacacttagaggccattgttagattagtaattggtccaatctcaatattgttgtctcagggaataggggggccagagggaaggaagatagatggggaatgggcagttggtaaagcagtcagaacacacacaacattcatcactttatattggcgcagtttgtggcacctcaaaacaattacaatagtaacatcacagatcactgatcacagatcatcctgataataatgaaagagtttgaaatattgtgagaattgctaaaatgtgacaacgagacacagagcgagaacacactattgcaaaagtggagccaacagatgtgcttgatgcagggttgtcataaattttcaatttattaaaaaaaaaagcaatatctgcaaagtgcaataaagtgaaacaagtaaaacaaggtatgcctgtatctgcccttgctggctttggtggtggaggaaggggataacaagtcaaggaatgtgagatagcctctagaggctggaacagccctcagtttacagtcagcaaggaaatgtaaatctcaatgctacaactgcaaggaactgattctgccaacaacccgactgcaaaaacccagattctcccttggagcctgaagaaagaaatgcggcctgctgacaccttgatttcagcctggtgagactcacataggactcctgcactacagatctttaagataataagtttgtgttgctttcagcctaaatttgtagtaattcattggagtaataatcaaaatctaatacatgtcccaaggttccattgacaactgttttaagaaatattttgctcctgtaatatatgcgtcactgtttttccagactcggatacacattagccagttgttcaccacctaactgacaagtctccaccaaacattttaggtttgtgttatgacagccctctacttccagtttcaattcctacatgagtcagaatagcttaaactatcctgtcattataaattagctaggaatcccagtgatttcacaaaggtttatgactcatagaaaatctgctatgggcccagcagaactccaggacacctcccttccaagaggtgactcagagatccagcctgcttacatctcatgactcagtttaatctaatatgtatattttcagggggccacagcaggaaaagaaaaccctgcaggatttttactttctcagatgaaaatatcacttgtcgcttttgctcacagtccattgattcacaaataaaacacagctctgcctaactccaagaaggatgagaaatgtaaggttttttttttttttttttttttgtatgtgctcagaaagaaagaactcaatattggtggtaactagtgatatctttctatactttgttacctaaaaaaaaatcagactgggtgttatgacgcatgactgtaatcccagtgctttgggaggctgatgcaggaggatcccttgagcccaggagtttaagaccagcttgggggatataatgagaccccatctctactgacaaaaaaaaaatagccaggtgtggtagcacatatctgtagtccccattacttgagaggctgaggcaggaggcacacctaagcccggcaggtcgagcaggcagtaagctttgatcacacgctccactgcactcagattggtccactttaaatctccagtttaaattagttttaatttagaccttttagagatcttcttacctcctgacttggaaacttggaaatttcagggagagaagcagtgtgggcagcattattaattcttctcccatgtaagaaaggaaattcattgtcttttttttttttttttttttttttgaaatagagtctcgctctgtcgcccaggctggagggcagtggcgcgatctcggctcactgcaagctccgcctcccgggttcatgccattctcctgcctcagcctcccgagtagctgggactacaggtgcccgcgacctcgcccggctaattttttgtagttttagtagagacggggtttcaccatgttagccaggatggtcttgatctcctgacctcgtaatccacccgcctcggcctcccaaagtgttgggattacaggcgtgagccactgctcctagcctggaaattcgttgtcttttatgggaacgtttctttcctctccttccaggttgtaatcctttgttttatataaatagtgaggaaataggagaaatggaaatagaaatgactgtctgttggtggaggaacatgccccagtcttcctctggctgggtatgcagctgatggcctatttcaaggtgatttcccttaggatggtgatgcattgtttcttggggtgatgtccagcatagttttgcctctgccccaccgaggaccttgtggagagcagcagccaagtctccctttgtcctcagccccatttctgggttgggcatcatatagcctgaagtagctactgggtttgcttccttttctatcctttgtgcttcttcatgcgtggaaattgctgaagcccttttgtatgccctctaagagtctcagagcactgagatacggtgaagattgcccacatcttcttaccagcatgcaacaccacagtcccttcctgcctggctcctctccccaacccaccacaagttcctgtcattgataatgatctccacgtgagaagcaggcattatactttatgtcctgagacataagacagagttactttcagtaactctgcagctacatctcaagctctcccaagaacttccttcccctgctccctcattcaagctccagttagctgtaatagctagcacaaagtgggccaataggttttgtagaccagatgctgcccaactacatgccccatgagatgcccatcttcctttctaaggggcaaaacaaaatctttagaaatagtttattcagagcatctctctttggtgtggtgtgggagaagaacccctctcctttctctcatgaagaggaagggaaaagccatggttctccttactattcagcagctgaagatgccagtgattctctttttacctccctagtctctttgggaaaacataatgtacataaacaatcaataaaatgcattacaataatgtaagtgctatataaagtcattcctttatagtactaccactaaaccactgtagaagttcagagaaagaaagagattaataagctctagaagtagtctgaaagagtcctgagctagcattcattgaatttttgtaggtgccagatactgtactaagcacttgtgattgttaatttgatgtggctatttgactgggccatggggtgtccagacatttggccaaacattattctgggtatgtctgtgagggtatttctggatgagattaacattggaatcagtagtagactgacaatcttcttcctgatattaacacaattatggagaaactggagtgaaagaagccacctcgacgatcctttcctagattcaccaaaactgaacctggaaaactccattgcactagtcagttcctcatctgtacctacatttaattccacttaactcatttctgcttctatttatttttatttttctaaatttagcccaaaggctgagtcagcccagccttaatgtccataatctgttgggcctggctcactgaaaaagtactgtggtgccttcatggagatgacactgaaataggcaaaagaaaaatgcacgcaaagccattagccagatgaaaccagagtcatgcttccttggcaaaacatcagtgcagtattaaaaagtagtgaggaacagtgggcaatagatgctatctgtccagatgccgtttccagggttctagatctgcattttgcggctgggagcaatagggccactttaaagaggcatcacagaagctattgatgtttcaaatgggattaaaacaaaaccaaatcaaacattccccacatgttgtaggcagtttcaaataaatgatttgccttgagattttcagtagtctacatggaaattctcagaactatttttcattctcttttttaaaaaataatgaatttatttatttcttcaaggtgtcagagatttaatccaagctgtaattagcagttcacctctccaagtacattttacaactagatcctagatgttttcatttgcataattcttgaatgtcatttgtgttaacttaatattttttgtacagtctttctgttatcaaaagctttccctatatttcatctcatttgaaagaataaattcagatttcaaaaggtaatttcagaagtgtctcttttaatcatgataaatttgaaacatttcttcatttattctctagatttagtatttatctttttttaatatctctgtgtctatgtatctattatatattttatttatattttatacctatatttaaactgtatatactgctttatatttacacttaattttatatttatatttgatctcctataccagccgtccccaacctttttagcaccagggaccagtttcctggatgaaatttttcatggagggtggtcggggtggggatagctttgggatgaaactgttccatctcagctcatcaggcattagttagattcttataaggagcatgcaacctagatcccttgcatgcacagttcacaacagggttcacactcctgtgagaatctaattccacagctgatctgacaggaggtggaattcaggaggtaatgatcactggctataccgtcttaaacttctgctgggcggcccgcttcctaacaggccacagaccagagggtctgcgggcccgtcttgtactatttactgtgttggtaaccagtacatctaggaaatgctttaacagacttttcgaataatatatattaaatgatataatttcttcctaaaaacaggattaatcgaggtatatttatatgagacaaaatatgattttcaatcccactctgtaagatttttacttatctcaggataggccaagtatttgagtactttgaaactttacagcctctattaatgccaaatagaaccctgctgttgtgtcatagaattaaatctgcgtaagaaccactaacttactttttcctttaattccttccttcctctgtaatagaacaatgctctcttccgccaagatgtccgtgtcctaatcctcagaacctataaataggtttccttacacggcaacatagactttgcagacatgattaaattaaggattttgagatattggagattatcctggattatgtaggtggattggatataatcatatatttacttaaaagtagaaagggaacaagaaaagaaggtcagagtgagggcatgtgggaagtgtttgacccgccaccagcattgctgcattgaagacggaggaagggagccatgagccaaggagtacgggtggttctagtggctggaaaatgcaagggagcagattcttctctagagagtctggaaaggaacacagctgtgctggcacccctattttacccagtgagactcagtttgatcttctaaccgacagaactgagataacgaatgtgtgttgctttgagccactaagtttgtaagtaatttgttagagcaacaatagaaaactaatacactttccttctttgttttccttttagcaatttaattaagtacctatcatactagaccttggaaattagaagacaaatgagctagaatatggaaattattgctatgcttttctgattttaaaatttcctagtaaagaaatatttcctttccctcttgcaaagcacactaaaacaaaagaaaatgagaaaaaaacacaacttcctgacccttaacaaatatgtaagttaggggtgcaacattcaatgatgatcaactaggaatataggaagatgctgaaacaagacaccccattgaagtagatctaagactaagacaacagagtagaattttccaaagcacacagcctatttttagggatattgtaaaaattttgaaatgtaatttacacatgattgttttaaacaacagaaaggaagactatcagctggtagtgagagcttccctagacaaaattttctaccaaagagtcagggctgatgaagacttacgcagatatgattatttgtagggagctgtctctcaatgcagcagagtggaggaaagagaccttgctttgggaatagccctgaagctgcctttttgtgggctggaaagataaatgcaaatctgtttcaccaggaaacttcagagaagatgaagtaagatataaccaggagattagttagcacaggcaagggaaaaatgggagagaaaaataaatcacaaaaatagagactccagtgagaagtagaaagaaaaaaaatctgtgccgaataacacagtagcagacatggaagataggattaagaaaagtgagcaaaatataatgtaaaagaatgaagagttaagaaagattagagagaagtgacatatggaagaccaacaaggcaatctaaggcacatatagttcatctcaaaatatgagaaaatataatatgagaaaatgttagtcataacaacattgaatttaaaacttgagaaagcattctgtctttcactgttaaatattaccattgatgtaaaaatattatagtaaaattattttacttttaagataaagaatcctttggaaatcttggttaaaaaaattaatctttaagggaaaaggcatcagaccagcctcagacaccctcacagcaacattatatgctagaagcaatgcctacaaagtcctcagggaaagaaaaggtaaaacaaaaattttaaacaaagtcaagcaatcaattaagtatgcagtgaacagacagacatcttggcatgcattcattaaggattatgaattccataatcccttaaaaaattattataggccaaatgtcagcaaaccaagagatgactggagaaaatacagcacattcactgttaatgaaatgatttaattttaagactaagactaaatcaaatgccaatcaaacccagaaaatgtaggagtaacatagtaacattcaggaaaggaaggaggagaaagatgaaaagcaatgtaaatatactgattacctttagaaccagatgtcaaagatattataaatcaaataaagcaagtattagaagtaaagatatatttaaagcttcaaagattaacactgagacaagttatgtggtaagcaactacagttttggatgatgaagaggaggaaaaggagaagggcgtgggaatatattactttcactgtttcttatagtaaggaatagtcatgaattgtacagatgtaataaatcatggcacatccatacaatggaatgatatgaagctgttacaaacatagaggctgctctacatgcatatatataatttacaaaattttaaagagaatagtgtataagaagaacaaagaatgtatgtatgtaagtttatatacatacactggtatagactcacaggcaggctaaataaggcacaggaatataatgcttccctctcagaacttgaagtcttggggaaaggcagtctttttctctgtattccccccaaccccaccacccccgttttcttgagacggagctcaggctgaagtgcagtggcacaatcttggcttactgcaaactctgcctcccagttcaagcgattctcctgcctcagcctcctgagtagctggaattacagatgcccaccatcacgcccagctagcttttgtatttttagtagagacagggtttcaccaagtaggccaggctggtcttgaacccctgacctcaagtgatctacccgcctcggcctcccaaagtgcttggattacaggtgtgagccatagcacctggccataccccctttttattgatacataataattgtacatatttatgggataaatatgatactttgatacatgcatacaatgtgtaatgattaaagcagaggaaatgggatatccatcaccttaaacatttatcatttctttgtattaagaacattccaaatcttctagccattctgaaacatacccctttttatgacttttgaattttgtattttgtgcatgtactgcctattataaaatgtatactgcagttgttttggcaaggaaaaaatgagttagaatcctgattttaccctccagagtttcacactcctttgaggtgagacagataaacagataactcttaaataatgaggtaagtgctatgaaataagacggtaccaggtgctttggggaagtctaagaggcttaattcctactggaggggttagagaagctgagttttgaatggaaagaataatttaagagatatttgtaaatggtgtagatgaatctacttaataacagactcaaaataaaatatgaggctgctgaagaagccaaatatggaaacatcatcttgtaccccataaatatatacaactattatttgtcaatgaaaaataaaaccaaaaataaataaataaataaaagattcactggttctggttccagccacctggtagattgcagggctacttatttttagttcagcaaatattttttaccacctcactatattccaagcaccatgttgaaccctggagattagaatttaaataagaaacagtccttttctttaaggaaggtgaaatctaataatggcatgtggtagatggcagtcataacttcaagtattcaccgctctctcaatccgtaccctttgtagcaccctaccactatgggcaggtcactttgccctatacctaaacaccgggcccaacccagtgacttgctttgggcaaaacaagatggtagcagacatgaagcaagcagaggtgtgaaatgggcttggcattggcacttcctctctctggtacttctgccattaccatgaagttgagatggaataaagccctttatgaaccagccaaaatggacacattcatttctggttgcattaatgttattttgaaagagaaggaaaaagcataaacatcacacaaatcctttgctgttagttgtttgtctgcaaatctgctgcattttataaaacactatatatataaggtaaacctggtgggtgcatccactccaaagagtaagacctataccacaattttgtgcaaaataaaaaagtgtactacgtctttggggccaattcagcccagtgccaagcaaaaggctttgcaagaggagcatctcagcgaacacttggcccattgactgagtatcctcatgcagtgcgcaacctgacctactgtatgtggtaatcctgcttaaattttagatgggactttctggcaacctccgcctccctggttcaagccattctcctgcctcagcctcttgagtatctggaattacaggcatgcaccaccacgcttggttgattttgcatttttagtacagacgaggtttcaccttgttggccaggctgttctcgaactcctgacctcaagtgattcacccgcctcagccttccaaagtgctggaattacaggcatgagtcactgcactctgccagctcagtttaataaagtctagaaaaggaacctctttgaggaaacacctatgaaatgcaaggaaatttttcttttgatcatgagctaaaatataagcttcataaaattctgtaaaaattcaattaatcttgtcttctttcttctggattttgttgaactgatgtgagtccaatttctgaaaaggaagctggagtcccatcagccggtatgcaaactgaccaagtcacacagcctctcggacttaaaatgttcaccaaccagcactttgggaggccgaggtgggcggattatgaggtcaggagatcgagaccatcctggctaacaaggtgaaaccccgtctttactaaaaaatacaaaaaattagccaggcgtggtggcgggtgcctacagtcccaactgctagggaggctgaagcaagagaatggcgtgaacccgggaggcggagcttacagtgagccgtgatcccgccactgcactccagcctgggtgacacagcgagactctgtctcaaaaaacaaaaagttcatcaattagttgaaatgattggatcacttgatcctctaagtcacttctaggtggaaaactgcaaaaaaatattattattttggtcagtattaatcacaatggcaaaattgactaaaaaataatgtaaaaaatttatttttgtgtgtgggtgaaaattttgggcttcctgaggcatagagggacaatcattttaactgaattgtacttttgttgtgattccaaccacatggagtcagtgaaggaaagaaaagaacattgagtcttgttgagtgtgcaattgatatttatattgtaagttaatgtatttttctaatcttgttgcagcataacagaaatggtaggaacgaatcattgtatttacaaaactgatttgttcacatttaaagaatggagagaaacataaaaccatgcaattaggccagcagttgagcagcctcattaagtactgggtatattttccatatgctctgatttcattttacataatcctgtcataaacaacaggtaagtgggaacagtgcactcatttgtaaatcatattctgtaggttaaatgctgatatcagttttgaggcttttctgatttaaatttaacagcacatattccccatatttcaagggaatgattactgatgttttggcatcagaaaaatactttaattgtcatttgaattatttggagtaaacccttttttatccagaaatatgtcataattttatttctgttcttttgaataaaatatttaggaatttactttaccatgacacagaatattctttattctcacgaaacaacccagtattgagcacttagtataccacattgtgctaggaatagagaatatggaaagaagtagtatagtagtaccaggaccagttttcttttcctttccttttcttttctcttctttcttttccttccttccttcctttcttccttccttcctctttctttctttccttctttctttctttccttctttctctttccttccttccttccttccttccttctttttctttctctctctctctctctgtttttttttctgacagagtcttgctctgttgccaaagctggagtgcagtggccactgcaacctctgcctccctggttcaagtgattctcctgcctcagcttcccgagtaactgggattacagttgcgtgccaccatgcccagataattttggtatttttagtagagatgaggtttcactatgttggtcaggctggtctcgaactcctgacctcaagtaattcacccgcctcggcctcccaaagtgctgggattataggcgtgagccaccgtgcccggccaagaccagctttcaaggacctttcatgtgcacttttaaaaaatcccacaatttttttttaccatcaaaacagattgtataaataccttctattttattatacaaggatatactgcacaacaataaaaaggaagaaattacagatacaagctacaacatgaatgaatctcccagacgtactgctgagtgaaagaaaccagacacggaagagtaccttttgcatgatttcatttatactaagttcacaaacaagagaaagcaaatctgtggtgtttgaatagtggttacctgtggtgtggtggtggtggtggtggggtgtgtgtgtgtgtttgtatgtgggaaggatattgactgaaaaagtgcatgaagaaatttctggagtgctataaaggatttatatctttattgaggtgtggtcacatagacgtttatataagtaaaactcctcaagcccccacttaagatttttgtactttattgtacatatatatatatataaaatatctttatcaccttcttcatcgtcatcatccagtctagttgaacatctgcagtctaatcatatcctaagcctagctgatatatacaaaattctattcttaagcaagtagtttggaatggaattaatctttattttacttttctattttccctttacactccaatcaatgattaatttaatcgaaagttcagtgggagttttttttttttcaccagacattacattgcacataaactcaatccttaggcaattttcttcattatcattttctttggtattcaaagaaaaccaaagttgttttagttgttcagtgcacaggggaacaagacacaaagttagggaaaggataccctgaggtccagacagctcgtatcaggcctgtctgtgtgctgcccacttttcaaagatatatgtctctaattaaggtaaactgggcaaatgcgccagtggtgatctctgtcttccaaagcacagcatgcaaaaagctaggtgaaaactgtaattaatgtgccactttaaatgggaacaagagatgtactgccctttgtctaaaagagatacaacatgatcttttgctaatacggttgagactattcagctaaaggtccttattgtcactattatcctttcatattaagtaacaatgacaataagcaagactttatacaaatcaaagtaaagaactggtggcgtttgcagtttgctttggcttttcttgtggtgaatgttaattttcataacacaatgttgccaggtaattgataactagagtctgcagctgagcacgatgaggtgttcagggatctacattctagagaaagtcttcaaaattggtctaggcatcctccttgctgcagaaacagctccatcttacctgccttcctgttggccaacccattagcctggctgggatgggcaattttctctattttctctgggcttccagtagatactctagaaggctcttcagcttaactttcttgcagatgcctcacccaacagggtggcctacctagcatgtgagacccagcattgagatgctctaggctggaccaccatgaagagaactgtggagcctgggaaaaaaggagaacctggggttggaattccagaaggaccttccaagggcctcccttattatctccatggcagagagcttgcattgcactcctgacagattgtgtccctgatttcctagccagagaagcagccacagtgaaccaagagaaggccataatggctataggtcaaaggtagagacactggccttttcttcttgctgcccaacattctggcggaactaggccttgaagggcaaatggcagggttggggagggtggctggggaagggcagtgggtaggaaaatgtttaaatgccagatcctgtgccagtaaccttccacttcaagaattaaggcatctaatagggcttgcagtgggacagggagaagacagaagactgaatttaagttgagtttgaaggtgaaggtttaacctgatgatatggtttggctgtgtccccacccaaatctcatcttgaattatagttcccacaattcccacatgttgtgatagggacccggtgggaggtaattgaatcacggggatgggtctttcctgtactgttcgcctgacagtgaataagtctcacgaaatctgatggttttataaaggggagttcccctgcacaagctcttgactgccaccatccatgcaagatgtgactttgctcttccttgccttctaccatgattgtgaagcctctgcagccatgtggaactgtgactcaattaaacctctttcctttataaattacccagtcttgggtatgtctttatcagcagcatgaaacagactaatacacttggtctgagttttaatactgaaaagtgataaactctgccctagtggacccactgctgtatccttagaataggctcctttttctaccctccctcctataggcattcttaatgcacatcttcctaaaccatcaatcagatcatgtcatgaccctgtttaacatcttccaatgggttcatgacacacccagactaaagtccaaggttgtttctgtgaccttacatggtctggccccctgctgcctctgtgaccccacttctgctcactccatgtcttgctctgccactctggcctcctttcatcccttggacatgccaagcatattctcatccgagagccttggctggtctcgctgctggaaacactgttctctagatattaacatctctcattcagcttccactcaaatggccttagagtggccatctctgatccctatctaaaatagctgcctctctacctcatctcaggaagccttcttttcaccatggttcttagcactactcaatgttttacatatatatatatagagagagagagagagaaagagagagacagagagattatatatatatttacttatataggttataaaacactacttagcactactcaatgtttatatatatatatatatatatatatatatattttttttttttttttgagacagggtctcactctgttgcccaagctggagtgcagtggccatgaccttggctcactgcagcctccacctcccagattcaagtgattctcccacctgagcctcctgagtagctggactatgggcacatgccaccatacccagctaatatttgtatttttttggtagagttggggttttgccatgttggccaggctggtctcgaactcctgacctcaagtgatttgcccaccttggcctcccaaagtgctgggatcataggctagaaccaccacacttggcccaatgttctatatttttaatatgctattgtctatctcctgtgatagtatctaagtttcttaggggcaattatttttgtctcttgcttattttagtatcctggccaaagagtagtgcctggcacatagaaggtttcaaaaaatttgttcaatgggccaggcacaaacctgtaatccaagctcaatcctttggctcaaacctgtaatctgagtactttgggaggctgaggcaagaggatcatgtgaacccaggagttcacaaccagcctgggcaacatagtgagactctgtctctacaaaaaaataaaataaaaaaatttagcaaagtgtggtagcgcacacttgtagtccaagctactgggagtgctgaggtgggaggatcacttgagcccctgggtttgaggttgccgtgatgatgccactgcactccatcctgggcaacaaagcgagaccctgtctcaaaaaaaaaaaatgtggaatgaatgaccatctaacatgtcatcaaaggcagggtaagggaattgagaatttggattgaatttaggatttagagaaaaaaattatttaatgtttatacctgagttgagattccttaataaacatattattagattgaagacttaacagtaacaacaaagattactgtgacttggtttaccaatatataaaatgaaagataggcttaatctatacaactttgaactctaaggcaggagggctagttttatggactctgatgtgtgtggtagattttaaaaacaaaatactactctattttgtgtctccttttattaaaattgaagttgatttctccatgttttgaatctgggcatggccatgtggcttgctttggccagtagaacattagcaagcagaggtataaaatgctattttgaattggggctttccttcttttgctgctgggaactaggaactcaccatacgaagaagccatatgggaataccctgtcatccttgccatccggatgaggctccaagctccgcatgtctgcagctgcatgagtaggcccaggagaacaacactgctcagctgattttagctccagttactgattcacagaattgtgagctaatgaataattgttgctttaggctactatgtgttggtgtggtttgttacacactaaaggctaactgatatagtgtgtttgggtgcattatctactaatactatgttctattgttaaaaactgtcaagacacacagcttcagctcatctgtctgtgagtgatacctggggaatagaggaacatacacaggaagccctggagaactgggtttgagcctagtgatgctacttcttggccgtgtgacctgggggcaaattgcttaacctttttgaaccttggttttcttatacatataaaataaagaacaggcctaaaatactgccctaacctcttgcaactaaaaatctatctaaagacagcaacatcagcatggtgtgggaacttgttagaaatgcagaatctctgatcccaccccagatctgctgaatcaaaatctggagtttaacaagatcctcaggcaacttgtatgcccattacacactgccttatcatgctggaatcactcaaaatcaccagatccctttttttttctttgagatggagttttgcttttgtcgcccagggcggagtgcagtggggctatctcagctcactgcaacctccgcctcccgtgttcgagagattctcctgcctcagcctcctgaatagctgggattacaagtgcccaccaccacgaccggctaatttttttttttttttgtatttttagtagagatgaggtttcaccatgttggccaagctggtctcgaacgcctgacctcagatgatccacccgccttggcctcccaaagtgctgggattacaggcgtgagccaccgcgcccagccaaaatcaccacatctttaatatccctaacagtgaagagccaccagcctttccctgggatctatctttcctttccaatcttgtggggaaacttggtctgggatatttttcttggcttcttcacaggcagacagcttcagctgctgaggagctttttttccaggctcagctaaaattacagcttagtagttgagctggggagtggtcagtggggcctcagccccctcttgcttaaggatgcccagttggttaaacttttgatgattattacccccatctcttagccctgcctggaaatggccaggatgtgccaggggaatgagtcttttgcatctacaactgcccctgcccatcagagcctggactattgtttgcacacacattccccctccatttcttacacttcacgccccgtctggccctttctttcctcctggccagccggaccggctcaggcggctgagcatgcctagtgcagctgcgagcatggccccagtccccaatgcgcaggtgccacgtctccgggttttggtggccgccggccgggagaaggaggaggcggagtggggaggagggagccctccggagttcgggagcagcacgttgtgagggtccacacaagggtgatgccagaccgaacaccattagggcctgggtgtgagtgtgactcggaggcacctgggggccgttgtagggccgggaaaagccaggaactggctggagcagcaccccagcatcccagggaccaaagtctgggggatttgcatgtctgaggttgcacttgtgggaagactttttggaaccacttaatctctgtggctctgtgtaagacccgcgaaataaaaagaggcagtagtactctttggaagattgttttagggattaaatgaataaaaagcgtttagaacactgcaggacgcattgtaggcgctgtatgggtttatgaaaccgaatataaacaaataagcacgtcccccacccagccaacggctttgggggccccgttctggccagtcctgagcccctccacacggcccacggcgggctgcgggtctcccatccgaggagggtgccgcttttctgcccccgctccctgggttctgcgcccagcgccatcccgtgcgcccccgacccttgggcatggggcacatgccgcggggagccgccagggagaccccagaggagcgcgccgcgggccggcttccccggatgccccacccacctcctcttggcgctgcccaccacctgcctcggctgctcggcccccggctcgcgaggctgcgcccccgacccagtcggcgcccactcctcgccctgcgggctcgcggcaactgggcggccggcccggcccctgcccacccccagcccagcccggcgcgccgcactgggcatgctccgtagcctgggcaggttggggctgcgaggcgacagctcgggctctggagccgggaggcgagaacgaggagggaggctcgggggcaggggaggaggaagcggctggccgctgaggggcggcggggcccggagcgggggacgcgcagggcccggcggtgggcgggcgggtcggcgctgccccgtgggctcgctggggagccacggcggagacccccgccctcaactgaggtaaggaccgcgcggcgcggagacggggaggcggggaggccagggagggggtgcggaggcaggcgggagggcgggactggggtgcgccgggagggggcttggcggcggctctttatggcgaggagggggtggtggcgccgcgccgggagcagtaagtgagctgcaccgccaacaagatctctcacacacagacacacacacgcacacgcacacacgggcgcgcacacacacgcgcgtacacactgggtctccaggcagcggccgtcgccgcatccccggcagcagctccaggcaaagtgacaggtaggaaaaggcatttcgggtcccgcccgaggatgctcccgcccgccttggccctcagggcttgtttgctttccgcgggtgcgtcccggacgcgcgcgcgcgcgcacccggatgcccagcggggaccccgtgcaggtgccgggtgccaggcgccctgtgcgcgcgggaggcaggggacccagacgccatcccccttcccctgcagtcatcgcctgctgggtttcctcagactctctccagacgttcaccctcttctgggctagaaatagctcggctcgacgtgtatatgattattttggttggaaatagttggcaccgtgcaacgcatgtaaatgtgtatgcgtgtggatcttcttgcctcttctggggaaatcatagaaatgattgaccgtttccacttaaaacaacactgacaggcttagcactcattgggggcagggttcgggcctcctaaaagcctgttagtgaaggaaatccttattttcagaattttaaagttgcttttgctttaaccaattagactctgtatagtacaatacttctgagtgtagacttcgtatatggtactgaatcgaagtatggaaatatggaattctctaatttccaagtgtgtttaagtgcaactttatctagaatcataaaactagcattttcctagagagaaatacaactgcccactatagtttccataaatatggatatatctgaaagatgaccctactcttccaactttttttcctcttaacttctgtagtgattctagctattgttctaaaacatgtatttgaaatttaattttggccagaatattcaggaaaggtgtttttttttccatatacgtaatacttagtggtctatatatttaagttataggtatgtggagatagctgtttaataattctttttgtctggaaataacgttattcaaacataggcagctatgtatcattttaaaatgatattgaatttccccttaaagagaaatcagatttataatgtaaacatgaccaggaaaagcaactggtgactttacctggggaggctccaaggaggttaagaaagtatctgaacaactgtgtttttcagaatagaaaaattgtgtgtgtgttgcgggggaaggtaaaattttaactttattcttttattgttttcaagacggctgttttcagaaatgtgtggttgaactgagaccctcatattttatactcttcaaatttgagtggcctcagttatagaatcatacagaagatcaaaagtctagctcagcaggggcatgtggtgtaatccctcactatctgtgttatgtaatccagaatgctgtttttcataggacagtcttgcatgatccttagctggtgtattgatctattatatcatcttccttttgaactgtagtagtttaataaatgattgccatctttggagagcacctgttttcataaaaaatcactttttgaaatggcaaaacatttttattggcacttttatgaacgtaagacttgctgccagacgagtaaccttttgaatgtgacgtattataacatatctaaaggtaccatgtattagcttatggactacacttccttccaactatattattactcaacagttggaacttagttttgatggtattactacccagctctgaattaatcgctgttgaaaatgctgttctacaagtaactgtcaaaacagaatttctaactccatttgatcactgggtgcacatttaaatctgtcggaataactctacctttattttgcaaatgcatacccacgcagaaagctttgttctaaaatactctattggaagttttatatttatatgcctgaaaatgtgagtgatgttaaactgcttacatgtcctggaatcgtgaggcggtgtgtttttgccttatgagataaagaaatatggtagttgaaaaagtgttacaggttaccaaaaaccttttgcaggaaaagattttaaaaatttgtatcacctctgaaatatttcaaccacagcagagtccattcagtgcccgtagcacagctagtttgcctttcccaagattacacacaactgtctttagattaatgtatactgctgactttggcaacatgggacagttatatttggcaatttcagtaaacatggtattttcctaagataccactaacttcattttggggtttgatttattaagaattgaaatgtttgcctggtattcatctttacctcaccctctaagtaaaattgaggtaaaagtgagcttcagggctgctgtgctgttttccttgtgatcacattagcatgctaatttgtgaaaggatgtaacaatataagtgaaattagcttctgagtttagtgtctgaattttcatccccagtttttcagatgtagctggaaaactcaaataacagaattaatgaaaaaattttgcagattattaaaaaaaattagtaattagctgagtttgattttttattttgaaatcttgagagtaaattttatcttttcggattagagcacttaggtaatgtaagaaagattttggatttctcatgctctccacacttaatagtaaactatttttgaggaagtataaattttctttgaaacttaaaattatttagcaggctgtgactaaatttttgtttgtgatcacttataaagtaagggtgaaacagcatgttgattagcaccgccgacccaggtcttttaataaactgtctatctaccacagttgagtccctgtaaaaccaagaacttctgtatttgatatgcaaaattaggtcaaggactaatggagatgctttaatgatcacagttggtattttatgtccagattgaagtttttaaaatagttgcttttcacctcataatatatgaatgtgtaggccatattagtgtctgtcaaggagacttatctgcctgttgggaaataaatacagcttttcatcgctggtgggaggcagcagtgactttctgtggttttgctgttggttttcagatgtgaactgtgtttgcaaggacactgcttaattctcagtgctgtccattccacattttcctatttccctctcatattgggaaaatgaataaacttgtgtagctctttcttctattccttagtatttgtttgtttaatagttttgcttttgataaagcctcaccctttaaagtagaaatactttctcaaattgtaatattatttatctagttatgccttagaatgatataaaggttttacatgttcctaggctgtgattctttagctaaccaagtataaaaatgagtttacttccttgccagtggaggcagacctgggtgattatgcattactgagtggatgagtgtgatgtttacattgtcttggttggaattaagcttgctttgaaaatatcaccctggaataacttttatttgcaaggcccacttcactcctttgcagcaaccactcccaaaccccattttctgggtggaagggtagaaagagtctgggtggaagctcacgactttggatgcttttttatgctgaaggcgtaacccaagtttctagaggagatgaaagtaataatgctgtacctttcaaatctcagctaggagatccttatgttccagggaatgaatgaccagcagagtgtttattttccctgcatgcacttcgtctacttttcctttcctttatcaaataaaaatagttgaaatggacataaatccaaggtttttctctgaacacctctcttactcactacttataaaaccttcaatgagaatgtcacacaccatgtgaccataagatagtgttatcttctcccctttcctgggattctccttcaaagctcaaaggatcttttggtatgcctagggctgggaaattccacctctagctacggaaatacccttgggccaggcaaatcatggctttaagatacattgcccttcttgtcctcccgaacaattaaagcatgtctttggctcccagacatgagtgaattgaagtagccatttccttagaaacaggaagaaaaaagcaacttgaagtaattaattgtaagcagctcatccagagatcagagaccacagaccacagacccctgattttacatttgacatctccctttcttctctagaacaggagttcttcattttagggccaaggatgcagtttggtgggtccacgaatgtggctggcaaatgaattacatctttatattcacttacttccaagtgacaattggggcaggtgttagggctactactagatcttggcatttagtgggttgaagagaaacacatgtattacttcacatatccctttaaagagttattttgataattatatttcaatgagattgatttccattgtacttttaggtatttaattttatatatttaaacatattatgctgggccaggcatgctggctcacacctctaatgccagcactttggaaggctgaggtaggaggattacttgaggccaggagtttgagaccagcctaggtaacacagtaagatcaatttatgcaaaaaataccaataaaaaaattagctgagtgtggtgcacatgcctgtaatcctagctacttggaaggctgaggcaggaggatcgctcaagcccaagagttcaaggttatagtaagctgagatcgcatcagtgcactctagcctgggtgacagagtgacagtctattaaaaaataataataaaatgaaaatatcctgctgaaaagggtctttaagatttaccatattgcgaagggcattcatgacccacacaaggcgaagaccatgtgctcgagaaatgcttcctcccagaggcagctggctgggtgggtgttttcactgtgggtttgcattgagcagtggttgctgagatcttcaggcgttggaatcaggcactgaattcctgacaaatgccctgttttagcttgaatgctgacagatgccctcttttagctgtgtgaccctgggcattcactctgagcctcagttgccctatctgtaaaatgaggagaataaccctatggggcaaaagtgcttggtgctgcactgtgaatgatacagggtactgttactgctgctactacaggtgctcaaaggatcccaggatctttgggtgtgcccaggtttgggaaattccacctgtagctacggaaacacccttgggccaggaaaatcattactttaagatacattgcctttcttatgctcctgaacaattaaaagcatgtttaacaagtgctactgccccttctcctaatggtactactagtattatggctctcatcttgttctctttcataggggtagatggcattgaccttatccatacaaagcagcctgagaaaattcctataaaatttacaagggacacttactttgccactctgcaagtacagaaagtttcagtcaccccacaggaccaccatgaagtaccagatcttcctttggacttgccaagcccagtgactgcatttggacagagggacctaatattaactcagtcctaatagcttcaaaattctgtgactttggtgtttcagaatataattcagtgagccagatgctgtccccagggtatctgtctcccagctaggcttttttttttttttttaaacaaaacaaaacaaaacaaaacaaaacaaaacaaaacaaaacatattaagccatttagacctggagggagaaaggcctccactagaagaattaggggtctctggtgttcaggggcagtcaccatagctcttgtttttccatggagtttctcggagagtactcaacttctctgctttacatagtattataataacaacaacaaaataaaacaacagacatttgttgagcagttaaaatgtgccactttatttaatacttctgacagcctttttgagtgtgtcctaatagcatctccagtttatacttggggaaactgaggttaggagatgttaaattaatcatcccaggatgttaaagttagaattgagactgaaactcaggtaggctgacatcagaactccaacttctaaccaccgtactgtgtattacctgtcattaagctggtacatgctgcagaaagacttgttaccataacaagttttgtgataattattttaagtgactaggctgagatatgacaaaagcttctggcaatcctgctgtgaatatggaattggaataagaaattgaggataaaacaatgcattcttatctaatcctaggtacttctgtttctgcagttgcatgccagaaatccgagatagggagagtactaaatgctaattcgtggtagcctaaacaaatagttttagttttctggaaggccggtttttacctggtgaagttcctcatggttttaatgagggtgtggtgtactctgattcctctaagggccaagtaagtgaaaggcccaagtgtggctgaccaggtgtcagaggccttagggagtggtgaggcttgcgcccatccaggggcccaattgtgccccttcccatggagcagctaccactcgggtctgacaggtttctgccaggtgggcctagggcccaggattaccagtgcctccacattttcaagagaagcatgaaatccagatttatttggagtcttctcattttaaaatgtttggaaataattaaaatggaaaacaaacctgtcagcccatggtgtggccaaacaaagcatgtttgtggtttgacccaggagctcccatgttgagccttttgttagctgtaagtgcttggaaacaccgtgtactagaacatgtcaatagtttttgttttgccctttaatttttttggctgtaaaatttcttataaaggttgttatggtcatttatttccagtgtacatagatttcagattctgaatttctgcttgtttattctctccctataccctatttttccaagctgttggcaaatacacaaagttgaggggggaagggcatgttttttcctcctgtttcatggtgctcctttaaaataagaacacctggccgggcgcgatggctcacgcctgtaatttcagcactttgggaggccgaggtaggtgggtcacttgaagtcaggagtttgagactagcctggccaacatggcaaaaccccatctctactaaaaatacaaaaattagccgggtgtggtggcaggcgcctgtaattccagctactcgggaggctaaggcaggagaattgctcgaacctcggaggcagaggctgcagtgagccgagatcacataactgcacttcagcctgggtgacagagtgagactctgtctcaaaaaataaataaataaataaaaaataacacccaagtgtacagaaataggtgacttcatttatggagacacagaggttctcttgcctgcctcactgatttgaactctaaccagtcacaagatgtcccccctgctatttggtagtagctgtatttgtcctgaaatatagaatacagatctgttcctgcagaccagtgtttcaagatgcagtccgcttaacagccctcattttccttgttgcttttaaatgagagaccacactggatcaaatgaaaatgcagttccttcgggatgtgtttctctcatatctgccaagatgctattattggacaaatcaccaaagccctctctgggatttcttttaattttttttcattggttttttaaaatgatgtaagtaatacattaatatgttccaattgaagtgataatgcagaaatatggaagcaaaatgcaaagtacccttttccacctacacccattcccagatacagtcattggcaatagtttagaatgcctctttccctccttttttctgtacatttacatgtataagtatatatacatgtcattttcttattacatatactggatcatattgtatacatttttgtctgtgactgacttgcttttgtccacttaactgtatatcatggagagctttccatgtcaatatgttagttatcttgttctttctaacattgcataaaatttgatagtacggatgtactgtactttatttaaccattcttctgtggacactattgcaaactgaaagattcaagatctttgttcgtaggtctttgtgcacatgtgtgagaattttttttgtagctaaatttctagaaatggaactatttggtcaaaagcctatgcacacttcaaattttgacagagcactgatgaattgcctttaaaaaaggtctccatgaaatttgtggaacctctgattatgcagctgaacatagcctctaattgcagcatgtcccacattgttacctcgctttactaattcagtaagatttcacttgtatatggcataccaggaagtgattttagaaacagactatgtccttaaaatcccttgaaaatacagttcttaatcaaaacaaattgatcagttaaggggctaatgtaaaaactcttttaagaaagacatatcttgtagaatcagagagttgaaaatctattttctgatcaatttggtgagctgtgaaactctagacccttcccagcagggacatgtccataagcaccctttaatctgttgttagagaagtgaggtggtccacagccaacacagacagatcagacgttgatactggcctgggaaaattaatttcattgctgaaaaatcctatccaggtgtgtttgtagctttaggttttcaaatactagttatttaagaatctcttttgctttttacttaaagaatgagaagattaggagataatgctatttaatgagttttatttaatggatacttgaatttaatgtccttgactcttatttttttatattttattttatttttgagacagggtcttgctccattgctcaggctagagtgtagtgatgccattatggctcactgcagcctcatcttctgggctcaagcgattttcctgcctcagactctcgagtagttgggaccagaggcgcacactagcacacctggctatttttttctgtttttgtagagacagggtctcgctatgttgtccaggctggtgttgaactcctaggctcaagcagtccccccacctcagccttccaaagtgttgggattacaggtgtgagccactgcgtctggcctggctatgtttttttgaaatgatatgttgataaaggactatataaattagaaactataccttcttttcttttcttctcttttcttttcttcttctcttcttttctttcttttctttctttttttgagatggaatgtcactctgttgcccaggctggagtgcagtggtgcgatctcggctcactgcaacctctgcctccctggttcaagcgattctgggttacaggtgtgtgccaccaagcccggctaatttttgtatttttagtagagatggggtttcaccatgttggccacactagtcttgaactcctgacctcaaatgatctgccctcctcagcctcccaaagtgctgggattacaggtgtgagccaccacgcctggctgctacaccatgttttcttttaaagagatattgggagaaatattgcaggaaatctaggtcactgattgattcctaactgtgttcagaagggactactttgataactgtaattgttattaatgatatgaagtaaattatttgtgaattttaccacattccttgaaagactgagactcagtcagggttagtgagtcttgattagataaatgacagcaaagtgaaatactgtttctgtttcccaaagatggatttagtcctttcatctgtttctccagatactcattttttaagaaaaattctggtttggttggcagtgacattcagattctgattgtatgccttctgcatgtttatttttacaacacactgtgaattgtagaaatatggtgggacagtcatatttccttggcattgaaaccttgcatattcaagaaagtctgtgctaggttttgctcatggaaatgttatagtgtttcacagtttacagacaatttcctttgataatgtctgtgaaagcacagtggagggcaccacctggtcactctttcaacctgtatcattcagggccctgctggggaacagatggcatgtgtacgccaagtcctttgaggagggcttgttaaagggaccttttgcaaggtgtgggcaggtgtagggaatacaatcagggtgaatgctaaagaaagacccagcagtgacggggagttagtcctactctaaggaaggggcaagaaaggctgacaagagctgtatccctttctagagggaccccgtctgcctgtaatatccctccagggagacagaggggaatatatataccttcctcactctctgcctgtcccctaaacgctggctagtgtcttccattagccgaacccagacagaagccagagggcaggagagaggaggaaaagggtggaaaaggtaagtgaatgggtctgggaaggccagtagcagacccccacccatttgccctccagaacagaggtttgcatggttgagtggtcagtccagggtagaaagcttatgatctggttttgtggacaaagaaaataaaactgcatctacagtgattaaattgaaattgaaattgaaattgggaattttctacaataccacatggctggtatcagtaaaatttgtggtgggccttagagtaacattaaaaaaattttttttttagttccctttggaagggattatgctttatgcttcttgggaaatgcgtagaatgggaaatgttatgtatttatctgattaaccaaaaatgtaggcttatagataggacagacagaagggattcataaagtctctcagcatggagttggattcctaagatagatataattcctttgattttaatattttataaaaatattttatttaaaatgtcaggtacctgggggaagagactaggaggaaattaaggttattaacagtaattttccttcaaggaagtcaatttaacagaatcattagcatcactgagtataaatgaacaagctgtatttccccatttgttcagcatggcagcaagactctgaaatttcaggctcatttattctctcattttcttggccctgttgcttgaaaggtgaagtctgctctttggtttgtgtacttgtcctgaatgaacaagcaatggaacttaattagaatcataaaataatactgctataaggtatatcagagttcatttcttcttacctccaaattgtgtgcagtaagaaaccaagatactagtcattagcagctactactttgcaagttctcagagttggtcactctggaaaaatcatatcacctctccatcatgaaggaattgcactagattaattcatttttgcttttacccttatatattcctgaagtccttgattccaagggtttggttgtccattactcactattttcatagattagaggcagagcttcttgagtacctcttcattacttagcccttaaaatggtattctctggaggtctctacattgcttttgactgtgttcactctgtaaactctttctgtataagataactcattcacttctaccatttttataacccccaatttactgaagactcccctatcactgacctcttgtcggagctccagatatatcctgttgtctgctggagatcttgacattgaagtctatggggactttcaaatcaaagtgtacaaaacaggagtcctcaacttcactccaaacttgtgtctccttccggtttctaaatcttcatgaaacaagctatccatctgttgagtctaccccatcaatatccttcatttttgttcacttttctccattcctattgccgctagcctgaatttatgtctgcagaatttcctgtcttgattgttccaagaatttttcattcagtctctctatactgtctctttcttatctgtgcctccattcatgtcttctattggctattcagtgagcatcaggtactttaacagtgagatcttgctctcaggagtttacagtttactggaggagacaaatagacactactttataagtttacatctttgcccgttgactccattctccaaaccagctaaagtaatttgcacaaaacaaatcttattatagcattacctctaagatacttcaacagctccctgttgctatcaggattaatttgttttcctaatttgccaaatgtaagccatccctggcctgacccctgtgatgaagttttaactcctttatttgcatcacctatactaggctgtgttgaaatccaagaacataaagcctgctgcactgtggacactgtggctttgcactatgactttgcactcaatccccttcttcaactggctgactcctacaggcctttagagacttcatacagttgtcatcttcctgtaaagccttccttgatttccactccagtccagattgggtgccctactttagtcctcctgttgaacagtttgcaaattttagccacagcatgactctcttgggaaatggaacaatctggtgcatattagtgactaagttgatgtctcttaaatgaataaataaccaaatgccattattgcaaagcctgcagattgggtaaattaggaaaacaatctgatgattaagcaaaaaaaaaaaaaaagccaaagtttagtaaaccgaagccatctgcagacctattaaagaaaaaagtatttcatgattatttacactggtcattgaaaagtagcagaataatcaatttggaaatatgataagtaatttgaaaattctatatccattatttctggtaacagaaatcctgatattgtaatcagtatactagatccagaggagacatttccctgaagataagttatcatttttttcctgataggcacatactcatattgtttttcctattttatgagttcgattttaatcaagttattcttatttttcttaacagtgtgttataacctggaattagaaaaaaaatttcttatttcaaacttggttggaaatttaggaacaaaataatttatttaatcagattattttattaagtgggactcttagtaatttaaaatgctttgtattcattttcttgtagcattttcttttcaaaatgacctgcaagtacatcagtgccaaacagagaaagcaagaaagccattaattaattgaagggaaatattctgctgaatacaatactgtttttgaaagaacatgttttatagttccaaaaccagaagggagcattttattcgtagtggtttgaatcttgtgaaaagagtgtctttgacagtcttcaccaggcccccctccccaagcttggagcattaataggacttaagaggtgttttcttcacatttggcttctttttgatttcacagatttcttttagctttgtgtcgaaaagtgctaagtatgttaattattagatatatcattattcacatttcagtgcagacaacatttaggaggattatagtttagttattacagcttttcagaaaacacttcatgatagcacttggaaatacagatagagaatatttccttttatttagagactttttggacctgtgaggccctctgagaatcttaagcttggccccattctgtccatttttcatttcctttgaaagagtttcaaagtaactggttaaagtttctccccatctgccataagtagcatagagggatttcttgtgcagctaccaaagggaaatgaggaaatttaaaagtgcagatgatttgggtattaacacatatcctggcagtggctctgccagaatcaggctctcccaaaccattttgttttatgttaatttttattttctcagctacagtattataaacatggcagaccaacaggttttccataaagattgatgatcaggaggaatccactccttaattaagagcagcagatgccttctgaaaaccttctggaaatgttctacttaatattgaaccaaagtgcttccagctttgttggaaaggttaaggcaataattacatggaaggtatgtctcatttgtcaacagggtttttggtctagaatatctcaagagcagttcctgtccatttccttctagaggtgacagcagccttcttattgcagaagggttatggtgcagggaacataagtgcttaccaataactgcttcctatcctcacacaggatacgagacacagggtatgagaccctcagaaaggaagtctctttctctacacacacacacactcatacacacacacacacacaccgcaggtgcttgagccacactgtggaatgggatacataagaaatggagccaattctttgatatttttgtctttactggatggctttgcaatattttaaaaatgttgaaacttccaggattctttaacaccgggcccctaacccattatttattaggcttaggcattgtgccctgggccttcagaatacaatcccatttcattctctcagcaattctgcaggttaggtataattacgaccattcgatactaagaaaactgagtgattacagcacttactgagggtcacatggttcatcagtggtatagacaagtttcaaaataaggttgacctgacctgaatctgaatggctgcatctgtgaccatacaggcacagaggaaaggccatatgaggacacgggagaaggtagcagtcgtcaagccaaagagagaggtctcaggagaaaccatgcttgctggcactggcaccttgatcttgaacttctagcctctggaactgtgacaaaataaatttctgttgtttaagctagtcagtctatggtatttagttatggcagtcctagaaacctaatacagtggagggtttcttttacatgcagatgaaagcagtccttgtgatacagaaacaaagtattacagaccaaaaatatcagaataataattttggcatttgaacacatgttcctaatttcaaaaggtgatttttttcttgagttggtttagtttagagagtatttgctttcactgagctttcataagagttaatttgtttacaggcagagatgagataaatcatgtctttctttagcctgtttctttatctgtttctttttttctacatgaattgcacatacttctttaaggagtcttataattaaaacatgttaaatgagctcaaatctttttccataattaggaacttgaatcattgcctaatttgtaatttgataagtaatgtgtatttgttgaatttttctgctatcaatgtaagtcctggggtaattttctaaaacaaaataaaaatggttttggctctgttttcttaacatattaacagtagtctaggaaatattttaatttctctttagttagttggtgctttctctttgtaatttttttttttgtgtggggaataaattatcataagacattcattaagtgcattgtagtgttttgcttaatttggtgcctgtcaggaaaaaacccagcagcacaatggaggtgctatgaatgagttattttatttattaatttcaatctaaatttatcaccaatggagaaataaaatatttgtagaattgaggttataaaacagcaaacataactgctgaatgatttatattcagtacattctttaatataaagattggatataaagacatcttcaatataaagcatgacattgatttgctttaaataaaaaaagaatatattttcacaaggtcaggagattgagaccatcctggctaacacagtgaaaccccgtctctactgaaaatacaaaaaaattagccgggcgtggtggcgtgcgcctgttgtcccagctgctggggaggctgagacaggagaatggcgtgaacccgggaggtggagcttgcagtgagctgagattgtgccactgcactccagcctgggtgacagagcaagactccatctcaaaaaaaaaaaaaaaagaatatattactttttctttttccaatattattacttgagtgagctttttaaacagtatggtgctattttattagttaggtaatgcatacatttgattaagtgtgatatattttgtttaaaatactattcagaacctgacatagctacagcatagaatggggtcacataataaaggttcttctcctttacatatgtgcgtgaactttcagtgagtcacatgaaatgaccactggtttggtcatttgagtttatttgaatacattagttatgagctatttagttctttcaagcagtcataattcattctcaaattttaaatcagacatgtactgtagctagcacgtagtaggcttttaaatgtgtcctaaaactaatatgtaagatgaggacatgggccacaaactgttattttgctttccttccttatttcatggttttgtatatcttattttggatttgtatgcattctgctgcttctaaaattagtatctaagcaatgcattttttaacattaattatcaagttttgtcttacttttaaattctgccttatataaggcagcataagtgggcattactgccttgctgacacctactttcctggggtgaaatatattgaccttgactgtaaccttgacatttaagatagttgactagactctgaaaagagaaagaccagcgtgattgtaaatcacacctatttgtataacatcctcaattacgtaataaaaataatccagaaaattgccaagatacttgaacatattatacggggattggtcttagaagcacagacttacccatgggaattagttcattttctgaagagtccttcaccaaactgaaagttgagtttacagtcctgagaatgtgatgcctctttggttattataaccacaaaacagtggaatggctgtttcttcctttaagcaaaatgatatgtttaaactctttttttgagggatgatttaaaatgtgttaattatgtggcttcatttggaatataagagatgatataaattaaattatcactgaaatttttaccctgcctgcctcactcactttgaccttaggaccttacaaagagtgagaaaaagccatcatgatgagaaaaagtgatcatctcaaactcgtgtatgtagatgaaaaaggatatatgtttctgtgtgaggatcccatgtagaaatacctttataaagttacttgcaactacagcatcggtatattgggaaggaaatgaacattttttgaagtgtcttgtgaaggtcaggaactcctctagggactctcctttgggaggaagtttagcaaaatggttgtgagcgtgtatgatgtgcattgtggggtcctggctttgctactgagaagccgagtgaccttggtcaagtcattgacctcgtcctccttatcatcattttttatatctatcctgtgagataggtggcagtatcctcattctacagaaaaagaaactgaggcccatttaagtaacttgttcagggccacataactagcaagttgtagcgcctcagctggagtcagaccctgctcaggattctaccctcttctaccccttccatgtggtcttcccctccttccaaggctgtgtttgcctagctaccaagttgacagttttgatcaaataggttggttgctttcatgttgaatgagctcagattaggagcaccgatcatagggaaaaggtttcgaaaaggaaattgggagaagtgacttatagctggccattgccctagctgattatgtgttcttgagcaagtcatttcacatcaccggtttaaatgaagggcttaggcttctagaactatttcttttatatttacccttttatcatcatgaagtgtttctctttgtctctagtaatcctctgtgtggaagtctattttgtcttattaatatagccagttcaacattattttgcttactgtttgcatgatataacttttttcatccttccaacttatttgtgtgtttccgtttaaaatgtgtctctttgtagagagcatatagttgattcttgcttttaaaaaaatctattccgataatctttgccatatagatggaatgtttagtccatttacatttaaagttgttgacataattatattctgtggttaacattttatgaaatatattacatttgcattttgatatttctatatcttctcagttttctttcagatttaactttatggaaaaaagtcacaagacttattttatactatacatagtatactatacataggttgtatacatagtataattggtttgttggatgggccacacttagtgagacataaacagaaaatagctttattctctcctctcctgtactttgaatgattttttttggcagatcctatagcttttcagtcattttacagtattggaacaacctaattttcaaatattagaaaaacatagtacaatgtaaatcaaaacttccattttcccatccagtttgtagcttctccccttttttcattcttaggcttgagcccaggcttagtgatcagcagtagggaagaaaaggaattcctggtttaactctcctctcttcctctcctacacattatctggctcctccagagttgacacgggggacataaaaggggccaaggctattgcacgtagcaggtgctgtttgttttcaaggccagttctttctcatacacaccctgatggattttttggagagcccttgcaggtccattggcatcatgccattatttgctttgagcactgcaatatcagctcctcatattccagtggaagatcactggagtgtctctgtgtccttgtccaggcagcccactcagatggaggcttttcaggatcattcaaacatgacaaccttccatagtattcacaaggtccacaggaaaactctcatcttaacaccatcagaccccgagggcacagcctgcttctacttctactggggctctgttgccttgcagatggcatcagccagccaatctgatgcacaagccatggtttctgcactgaagcaggcatccaggcagggaatagaatatcagcctctgtcattgcagatagcctcaatttattatggcttttcttttcttttcttttttttttttttttttgccttccttatgaggtgttagagagagaaggaaagggatctgttgaattttctttgaagagtttgctgcagtgcagttcttctcatacacagactcttggaggtgatctctggactggcttggccatgtgtagcaagtcctgtggacatatacaaggaactcatcatatcacctttggcattgaaacattagcagaaaattgaaacaatattcccttttctcatcattagaagaatttagagatcactggcttaatagtaagatgcacagataagtgttaaaccttcagctacatttataattcgtgaactgccacactctgtaagctcctaccttcacagtaatgagaaatactaagtaccaaataaatgcttaatgaatcaagtcatggtgattgcaggatattggtctctgggaaaggtaaaggtgaccaatataataagaggaatgaggttgctaatctgtaaaattctttactgatttggttaaacaatgggtcacttaagtggaaaaaaatagaattcaaaactactgttagccttgtcaaactagttggtcaggttggcctatataaaacctgaaactggattgacaggcacttctgctggaaatctctaaacagtacagatcatataggtatattcataaatgtatatatatgtaaatgtgtacttttttgaggaatatatatatacttttgcatatatatgcagacatataaatatgtattttatagactaatataactgtcagagaaatgacataatgatgtcatataatatataaaatataaaaatatactttaagagttggcaaataataaatagcacagataaaggagaatggtttggaacaagaaacaggtaatttcccctaatttttggagcagaaatagatgaatatgaaatgtatatatcagttcattagttagcttatttcaaagtacaaaatagccttaaaagatttaatgtgattttgtaccagaatttataggtgacaatatgataagaagttactttaaagttataaatttaattttgactagttaattatcaatatatttaaaaatatattaacatgtgctttatcctaattaaaaggagattatatctcagtagtgtctaagatttttaaaaataactttggtacttataaaatatgtgattatgtaaaaaatattggaaaataacttaaaagcacaaagaagaagggaagaaggcaaaactacctttaatctaattataataggtggtaaccaatataggccagaatgagaaacaccagattgctttttgtttattgatacattttttccatgagtgacaaaaattggtcttttcatggtagaacttcctttgatctatatttaatcagctcacttaattttctgtttaaaactaataattcctttcatggctagactttgtatgtaggaagtggttctaagattgtgtccaatatcatcagaaatctgcttaatataactcctaaagctttatttgtagactagatatttgtatactatttggagcctttgtcagctgttaggaattattttaagatgtggagaaagaaataaagttagctggtgaataaggaagtattttcacacttgatcctgtttttagttttaatcctggaattgcttatagcagttaatgtggacctcaatatttcattttgtaaatgagcagtgtcagtatgatggtggggttaaatgcaagggagatgcttttgtcctacttttcaaggtatactttaagcaaggtaagcattcgtaaaggagtcctaatttactagaaagcttgaagttttggagcagagattttcaaagaagttgtacgcagagttctttctgagctatggcctgatagtgtctttgtgaaagtatcttcttcccatttcttttgttatgaagcctgttttttaaaatcattggcctttggtgaagattgaacacattgaaaaataactgtataggagaaaaactgtgagtgttatagtgttatttaattgagaatactatttatgtgtgtgtgtgtgtgtgtgtgtctgtgtctgtcatgggaaagtattgaaatgatgcattactgaagaaaaaaggatttgtttatctttccaaagagaatcgagctattatttgggaaaaaactcaacatccttttaaatcatatttttttcaaatgtatgtgtatgggaaatcttaaaataatagataactaactaatagaaagggggagggaaaaaatggaagtgtgctttgtcacccgataactatcccaaaataagtttggcttctaacacatttttagtgtgtttttttttttttttcaaatgggtattagatagcttccgtggtagaagtgaggacttgcagaatactctgtgttactaaaaaattgctggaaaagttaacctgaaatggcagagtaaagaagctcatgtttaagctaatatactccagtaacttttgcatctctgcacgttcatcacagactgtgagcatattgtgtataaataattaccaaatgtttcgggggtggtgattctatttcttctccatgagaatttataaagttgttaaatttggtttctttggagtcatcacagtttatttcactgagatgtttactggataaatattttcacagaagttttcatcaacttcaaagaggtagtagttattcaatgcaaagtattagaagcctattgcaatatacatgcaatttgttttctttcgacagtagacttgtttctctttttggttcaaatgaattcattattttaaactgcttcaatcaattcgatatgttgtattcatagacacagtgggttttatttgtaagcctccccagagaccagggtccccagggtcttggtgccacatgttctgtaaatgtgacaggagagctggggtgtttgtaccatacatgggagagggctgatttctgagagaaactaatgctgttgactcataagtttctttttatcatttctaggtcatacaagtacatggtagctttaaaaaaaaaacatgccataggtatgtagagcctttataagtctcgacaactgtaaaatgagctagagaaagtcactatctgggtcatgtggaaccacatctggtttatgatatgggcatgtagtaattgtgcttgagattacagtggagcctcacctggcttatgtttttggccatagactgaaggttcctttgaatgttccctcagctaatgtaggtatgcagtttataaataatattttcataaagacaaaagtgagaagcagcattgtacagcagaaatgtgagagctgactttcctaggttctgaccttcctaggtttgagtatccagtctgtcttttgctagaaaagtgacctcaggtgagctccaaagctccctctgaacttgtcctcatgggaaaggggagagactagtgcctaactggggagcggtgaagactgcatgaaatactagatgcaaagtgcctaacacctcacctggtttatacaacaatagctacctgttagttgtagttctgttcttttctttctacagacatttgaccattaaatacacaattatttcaacccattattatatttctagaagtgatgcttacagatttttttttctttttgagaactgcatgcttttcataaagtctcttggaaaagtaatctctatgtagttttgcttcttcattcattcagcatttgtcaatacttgttactggcttgcttcctgaggtctaggagtttatgttgtatcaagagagatctacagataatagaagttactgtagaattttaagttccacagaaggtgcatttctgaggccctataaagcagcatttgaatcaggtcagctcttcagccctcgagaggtattttcatgttcttgttttctgttttttagtgatgttccatttctggtgtttaatctaggcatgccactaaatatttacttttctttgtgagacaggttaagactgtcttaacttagaagattcttcatttctttggtcactggaatagcattgctgtcttttttgtcatcattccgttttgcattgttatcattctcttttgcattgttaatatcagaatgtaatggtccttaggaaagcacagtgtggctcggtagagtgatgtgccttgttgtttctgatgcttttttgattctctctgaagcctgttggtgagcctgttgggtgagacatccttagtgttgacaagtgggaattgttgatgaggtttccactgcaatggtgatgtatctgttactgagcagttatagggtgcatcgcagttagttaaaataggagcagcttctcaggatacagaagggggaaaataagttattgctggtgtatatattagaatatttttggctgtgagtgatagaaaacagcagcctaaactaacagaagtttaagagaaatgcacgcttgggaatctaagcattttgggcagatgtggcatctcagcagtgccatcagggaaccaggttccttctgtctttctcaccactccttatcatttagcatttatttgtcttcataggtgtgagatggctctgcaccactcaggagctatttccaggaaatgagggattgggacttgtttacatcatgagaatgaactttctcagagctctctctcttgtatctcattggtcaaaactgtgtcatgtggctatccctagctgccatagtatctgggaaagcaaatcgtttcagcttagtatattggctcgtaacgctataaatgttggctaaacaaatagctatagccaccatacctgggaattttgtttttgtcacatctactagcttagttttagatttcatgatttggtaagtattagatgctacttcattcattcacttatttgacacatatttattaaatgcataaggccttaggatataccattgcaaatttaataaaactagtcctcatattatggctgcatgaatgtaaaatatctaagtatggttgcgagctaatggatgtttctcttagctcatgtagtaaatggctagaactgtgattttcaaattgaaaacaactgaattttgtttagctgacctccgtcatgtaactcgttcgtaattattaaccctaccctccctcctctgaccctcagtccttttactgataaatttggaagcctgcctcctgaggctgagttgctctggttttcccataatactcccttttccagcttttatatgcttacccattaagtcagacaaatttccttttcagagtttggcattgtttctttattggaaaggaaacagattgttttaggccaggaaagcttgcaaaagaaaatagaagaccatgaactatgttttttattttcttgtttttaatcatcacatctcacgttaggatttagtgttagatctcggtgtgttttctgttcagagggaatgtgaggttcttctggcacctggtttgtctttgatgtggggtaggcacagctttacacatggtctttccccaaaccatgacataaatcctgctttttattttatggcgagggtcaggtttccagtagtggcatctggcggggtcagtaaatcaaattcctgggctgtgaggatgattttacttgtgggtgactttccctgcttgttgtgagagctcagctttagtgtcacatggcccctttttggctctttcaaattttagtcaaattgcgtggtataatccataaagtgcccatcttttgtctgtttcacagtgacagatcactgagctaggataagcaggtagcagatctgataatttatatctgtggccccaaatctttgccatgaataaaggatttttaaaaaaagttgtttcctcttggatgttggcattagaaagaatttgttcatgaaacatcacattgatactaatgatatgttattcatttccccaattacatgaatcaaaggtgtatttaactacctacaatttctgacaagaatgagataaccagtgttcctatgttgatgttacttaattgaaagcaggatacctaaaatcaaaaaagaaacagaagatttattgcaactaaatatatatttgttatttggctttggaatattgaaataaatattcaaagccatttttataatttttttaaaccatacctataagcttttcatttttcctagtgtgatatttgatttttaaaatttttgcctaaagtatttctttttttttgttagaaagtatttgaaaaacagaaaggttgtgatagttatgatctgtgcatttctctctgtattttcacaaataattcccatcaaatgaacatttaaaaaactttttattatggaacattttgaatatacataaaagtacagtgaatatcacagtgaaccttcatatatccatcattacactgtaacaaactcatggcagtttcgtttcatccattactcctccccatcagtgacctcaactggattgttttgaaacaaatccatatttgaagcaaaaatagatatattatttctggttggtcagttatgaactgaagatctataagtggccccaccccagttgttactatgtcatagattatgatttggcttagtgtacgtgcagtgacccatgtgtgcatattgatcatcaatccatcgtggctttcttagctatcttggctttcttttgttagcagagcttacctgcaactgtagtttcagaaaatagaacaggcagctcttaccatcactatactatattggcagtgaaggggaccacagtactgctggttgacatatgaagtggtgaagagcaagagaggaaaggccccagatgctggcttacactggggagtccacatggggcattggtgttgctctgaaggagagaggttctgcagctatctaagcttagccaagaagagtggaactcattttggctatttgcagacatggacatggttgcagggttcacgatcctttcagtaggatgttgtgagaatttcttatttaaagtttaaaaaggatttttattctgaagtgaagcaaacacaagctaatggaggatttctcatttggggagagggactcctctggactgtggtctccttgaatttatgcattggcggtcatttcaaatctttggagctcttttgggtcagaatcctggtcattgtttttgaatctatatatcattatccccattggaagttaaattacagacggaaccaaacatatatcatggtcagagacagaattacattcttgtgaacattatcccatgggtcattttaattagatttgaccggaaacagtttatagtagtggatgattaacttatattaaactaaaccatttactttcttattttggcttgaatatgtaaagttaaaataatttatattaacaagtgattttgaaaagtcatatttagtatttgttagtgactagtaggtttctgtgtcaattgtttattgaaagtaatacatgtaaaataaaatcagaggtatcctgtttttatttaaatttttatgtagtttttttgtaatctaaaagtcttagctaagaaaaatagagcccataaatatagtttattggcttggacaataaaaaatcaatagaaagaggtagcagctcatagttctcttaccttctgctacctacacagcccatcacaaccttttcacatcattttcccactggaaaagcagaaacaagagtggagttttatatatttccttctttgtttatacatttactttatggaattaagcaaaatgtttgaaaatatgtcattgggatagatgtgatgtaaaaactttaattctaattttgagcaattttcatttacttttatccattttccatttgattttatccattttgttctttaaaaagcaaatcattggaattaaaatctgtaaaatgttttatgtagatagaaatgaagaaatatttcaagtctaatttaaagatttccatttgtttaatattataaatgaaacacaacatggtaagattataggctggtcttaaaaattcacatttgctatttattgttactagtaggtagtttttcttctattttttcttcacaggaaaagacaatttctctctgattcagaatcctgaaaatgtgatctcccttaaaaaggtaggtgtatgtgctttttaatttgtgactaaaaaaattttatcttgaataaattacaatccagatgatttaatcgagaagcaattttttatgccactaacacgtgccattgtgaattgaattaaaacctcagattcatctttctaaattcaatatttaactttgccagtctttttaaagaatgactattttgagacaaaagttgatgtctacagcagtcaatgtatgtgatgtataataagtgaatgcttctcagcagatccatttttttattgcaatacatttatttcagctcatcttgatgaaatgtgttcctgtctttttcagtgggtgacatctttctaggaaaccaagacagtgtggaaatgtaaaatggtctgtggccagtaaaaaatgtgatatctttcattttgtggtgtgagatttctttttcagtgtgtggattgtgatttgctgcatactttgtcagctgtaataaggttgggggcattcttgggtgtacggtatctttttgtaatccatacagagcctgcaagaggtttccaaatttcatggagtgaactcatactagcttaggagccactttggctttcttttttttttcttttctgaggcagagtctcgctctgtcacccaggctggaatgcagtggcgtgatcttggctcactgcaacctctgtctcctgtgttcaagggattctcttgccttagcctctgaagtaggtgggtctataggtgcccgccaccacacccagctaatttttgtatctctagtagtgatgggatttcaccatgttggccaggctgatctcgaactcctcatctcaagtgagctgcctaccccggcctccgaaagtgctgggattatgggtgtgagccacagcctggcctttttttttttttttttttttggtttttatctcatactttttattctgaaatatggactggctctcctgttctgaaaggtgtagttggggacttggttctgactagagccatgcgttcagggagtgcctgtggagactgggaaaccgctaggcatgagtggtatggtgggtcccatggggctgtcaccccaaaccacaggactgcctcagagatttggggggtgttttaaggtcacagtggtcaaatctgaccttgtgccattatcctttcatgttatcctctagttggctctcagactgtaagattttaccttttagatcatttctgggctgagaagttagggtatagaaacaatttgtcctgatttaattacaataacaaattcgtgatgctgatggcgtctttcctcattcttctgcaacctcacaagaatgaccattcacctccagcttttaattacccatccagctagctcccagccatctctgccctgggaatggcttggttctctctgacagagctcaccaagcagttgctcacatgttacttataaagcacccacctctagatagcaaaaagtgaagactatggtccatactatatcattggaaatctagtgtggagaacgaacatacattgatttccaaattggaaatagaggagttgaagctgagttgtaatgttcggcccatttaagataaatagagccacccgtgtaaatttggcatttggacataaataaaccctatgagagtatgctagcagagtgaacttacagagaccagagagattgttgcgaatttgcttcaaaattggagttcaaaaacctgctgtatgcaattattgcagtgaattgactgcataatagttaaataaatgttttcttttttttctcagattatttatttaaatgttggcttcaaagacgatatagagaaacatgagttaatcaaagacagagagtgaggataatctttgatagaatgatgactgcaaaagagctgttaagtgtgatataaatgctgagttataaaaatacacttttaggaaatccaaattattaaaccttgatcatcttgaataataattggacttaactgcagcataaatcatctgcatcacgtatctgctagcagatatgtatagaaaaaattcgactttcaactactaggaaagttgctttttcgcatttatccaacattaatctaaaatccctcttgggaataaaaactcacatatctgcaaggtcgccagacagttaggagcacattctggaaaaggctcctcagctgcatgggtgacagagcccaggaggctgtggagtattgtaaaagtcctggagtatgtggcaattaattcgaaggatgtctcatgtgttaaatagtctcatatatatatacacatatatatacgtatatatgttagtctcatatatatgtatatatacatatgtacgtatatatgtacatatatacatatatacgtgtgtgtgtatatatatacatatatgtgtgtgtgtgtgtgtgtgtgtatatatatatgagactatttaatacatgagacatccttggaattaattgccacatactccaggtcttttacaatactccacagcctcctgggctctgtcacccacgcagttgaggagccttttcaagactgtgctcctaactgtctggcgacgtatatatatatatgtatgtatatatacgtatatatatatgactattttaaaactctgtatcattcctgctataaggaaatatatatgaatatgaagtgttactgaattaagaggtgcttttttattataatgtattttcttaatcaatagaaattaaatctactttatactactaccatttatactactattataaatggctaacaattcattttgacattaaacatggttctcataatcaaagaagctcataatcaaagaagttgaaagttgttgctctagaacatggggaaggtatctgaatcatgttaagattggatccatgattcgagcaagacagggccagaatgtttttaaatagtcagaagaaagaaatactcagatgtttattttattagatattagattaggttactaggggcaatagaggaactttcttctataaacttttaaacagtccattttcttgtatggtagcttggttagatgtattcttcagtacgaaagctagcagccacatgtggtcatttaaatttaaccacatatagttattttaattaagaaaattaaaaattgagttcatcatttacaccagtcacaattcacatgctcattagctacatgtggctagagggcagcacatagaacattatcatcatcatagaaagttttttttttttacagtgctggggacaattgtcatcactaggactgctccatgccacaagtagtaccaacaccacaaagctattcctaggggctttgcccctggggtcctggcatggaatggagaagacaaagcctggtttaccctataaatcgtgggagatttttatggacaggagtccttagtgaatgcgtggaaaagaaaattgtttccccataatcttccagctcccctccctttcattatggcccatatcccctgacaagcggcaggggtccatgtgccagtttgaattaacattttattgtgtgtacagtagacatttatccccatttgggctacctggtatctgaatccttttcctgaatttgggggcattcgtcattgtgtgaagctgggtggataaaagtgtcatttcttttaacttcccaagcagaaatgcccacttttgtgtttttcttgatgtctgccagcaagtaggcacactcatgggacttcaggtttgtcacatctgggactggggctctggcgagatgacttagagaggcaatggtttggaattctgcccatcactggtgcgggcaggaggaccatggtggcaggtccagagccacctgtggtgaccagcaccaacagtgcagtaggtgaaacagagttagttactgggaacaaaagcaatactaatggaaacagccttcccatgagtataaggagctggactagtctcccttgttctaatggacatcctccttacgtggaataataacaggacaatttaattttatttgttattgttaattttttttagagacagggtcttgctctgttgcccaggctggagtgcagtggcatgactgcagctcactgtaacctcaaacttcataacaggaaaattaaagaaaaatcaaaagaaaccacttagctgtaacacaaggaagatatgctgacttgtttaatggaaaggaatatactttaatggaagaatacatatatcagaatttcaaacatcccccatggatttagtaatggagcaactccattttttgtttttgatagagaattgtgtttataattctgtttcttacatgcaccatgtaatcaaaactgttgcctgtgaataatcactctttttctgattcctacttggctaggctggtatgcctgttttattgcttttccagaacagatagactcacatattgtttcacgttatgttttgagttcttaagcatattgtctcttcctcctgtgcgctgattcccactttcgtgcacacagcagctgtgtgaccatctgcatcatctcgacagtgccacagcttcctccgtagaatgctacggtgtgtcgcccgtggagggattcctcatcccaagcatgatttttatgtgggtaggctgcccgcctgtgaggtgaagtttctggtggcccatttcttcatatttcatgataattggtcagaggcttgcctggcagtggaaccatcaccccagggacagaggttgcctgctgtccatcatcacttatgctcagccctcaatagaaaagaagtatggtgtgaagcagccgcccaaccagagagactggtggaacagcctccatttgtatgtaggtgagctacatgatttgtcctcaccaacacaatgtgaacagtcctgtagggcaaatctgggacaaggcgtcgaaaccccaggctctatcgtcctctttcctgtggttagattcagatgactgggaggcctgaggggatggtgagagacaggatcaagtgaacctgagtctaaatcattgcgttatggatggctcctcactattcctattcaggaatccacatgttcctgaacagaaaatctttaatagtcatatttgccgtctttcccagtaacaaactctatacaatgaaagatggagcataaattatgcgagcaagaaagagaaatgaggttctattatgttaactctttatgtattttcagatttattcattgcagaggctgacattacccttgtacaccctcattcagccacataaatctcattatttctttttatcaggtattagctgacattttttcatttttcagttgcccattatgtggaatcatcttcttgcactgagtagtagcatggcttatacaagagtatgattatggcctacatacatttccctacatattgcctagtgttgcttacagataggtctaagagttagaggaaagcttagtgcctcattgtaaaaacaatttgccagttttgtaaatcagcttttttttttttttttgagatggagttttgctctgtcacccgggttggagtgaagtggcatgatctcggctcactgcaacctctgctccctaggttcaagtgattctcttgcctcagcctcctgtgtagctgggattatcggtgcctgccaccatgcccagataatttttgtatttttagtagagacagggtttcaccatgtttgccaggctggtctcgaactcctgacctcaggtcatctgcctgcctcagcctcccaaattgctaggattacaggcatgagccaccgcacctggctgtaaatcagagttctgagtgagtttttaatcctcttggatcactacaaagattgcggtaactgagaatgcaagttcagtgactaattttgcttcataaatgtatagaaaatggttgatggtcttattagaaaacatttcccaggcttaatagttctgtatagatgatagaggtagccaatgaagatggaaagagggaaacaattatacaaaatcatcttagattacaacagaaggagaaagtatttgatactcatttaaaagcagcaaatgcggtggttcgagatatacattttgcttttggcatgacatgtaaatgattgcttggcagagatgaagaattagggatttaatgtttttgctttttagtttactgtgtattaactaataacattttcttcttctacaatatggaaatagcaactgtatacctgtaaggttattaatggaggttttatgcatgctgatatatttgaaatgtttttagttctttaggagaaaagtgcttaataaacagaaataactacttatgttaacagtttatttctgttgacttaatatacctactttttcctcttaataatgccagagcatatttgggggggggctatagcttgaacaaaaataagacattattaatatcagcactttgtaacctgagacagatgatttaatctctcctgccatgttctctggggtttaaaggtgctattcagcaagattattatgaacaccaaaaaaagtctgcataaaatagctgcttggctgtcacttccatataagctatgaaggcaatgatgacaattaagtctaggacttgtaggaaccacatatactcactcctactgcctttgttcttcttcatgtctgctctgccattgtacttttttttttttttttgagacggagtcttgctttgtctcccaggctggagtgcagtggcgggatctcggctcactgcaagctccacctcccgggttcatgccattccattgtactttttaacacattggcatatactctgtgctgactactccagtatggagtgcttctcaaactttttggtctaagacccttctatactcttaagaattgttcagagttctaaacagctttttaacatgcagcttatatcataactatttgctatattaaaaagtaaaatgggaacatttacaaatacttattttaaataacagtgataaacccattacatgttaacgtaagtaagaattttttaaatgaagaattactgtatttttccaaacaatatatgtttggtgagaagaatggcaccatttaatatttttgcaaatctcttaaagtcttgcttaataaaagatacgtgaattcccttatttgcttctgcagtttattgagatattgaacatgatgaaggctctggaaaactctttcagagagtgagaataataaaaggaaaataatttcttagtatcattatgaaaataattttgacctttcagaaccctgaacttgtcttgagcacaaaatttgagagtgattggtctacgttaaatccccgaaggttgtctttagagtatttccagttttgccacatttactactttgtactagaaaatccctttcccatccaaaatattagtaaataactatttctatctagttaattcttattcagagaaataactaagaggctaaattataattgtttaattttaggctgcaattttcccatttattaattgcatcttcagaatatgctggcatcttaacccatttcccccattctcacagctgcttttaagtcatttttctcattgataagcactattatgagagcctctaaattggtctctgttccagttgctattgctgtgcaacaaaccaccgtgaaactaagtgcttgaaacagtaacaaccacaaatctgcagttagggcagggtttagcagagaaagctcatctctgccccttatggcatcagctggggatattttgactgcatgccagaggatccacttttgagatgattcacctacatgcctggcaagttgatgccagcagttggctgggagctaagaactagggatttccgtcatcaccatgtgggctctcaatggactgcttggtcttcctcatagcatggtggctgagttacaagagtaagttttccaagagatagaagtaaaagttgtcactttcttaaggtctggacatgggaactggtctagtgtcacttctgctggattatagtcaagcagccacaaagcctaagttcaaggagtgggaatacagactcctacctctcaactggagaagtgtcaaagaatttggggaccatgttttaaaattaccatactctctctgcctcagtccttctcacccgcaaattgcccagtatttgcatcttgtcctcagattcaatttcctagaacatagctctgtttgtcctgtagctccccattttctacctaagaacaaaattagtcttgcattcagaacagtccatttattagtttaccctattccttctttagtataccctgcgttttagcccaaatttatctggatttttcttcttttgcctttgattatactttttttctctcttcccagaatattatccctttaatctcttcacatcctaacattctgtcctcataataaatgctaccactcacatgaagacttccttaagctctccatccttctgtagtatgtctttctgttacctctcatcatacagtttaactgtaccattttaaagacctcccaatttctgtcttgtacaataatatatgtatattttatatgctctactagattttatgttccttggaggagatccatatttttaaatataatattaatctttagttgctctgatatcttgagatatatgtaacaagtgcttgatttttaaaaaaatgagtgaatgaagatatgaatgaaattaacagagtatgtttagactcacctaaaaagctattagaagtactatgattgttgattaaaattgctggttagccgcaaactaaataagtaaaaattgatgatttaattaccaagcataaatattagacaatattattaaaaagagatcacatccaaaataacagtacaaccatacaaaagtttggaatgactttcctagaaatgtatggtaggaactaagtaaggaaagctacaaaactgaattgtaggacataaaatgagtttcatattagtggagagagattctttgttcttggaaagccagattcagtgtagtaatacaaaaatatcagatttgttcatttgaagtgtacactcagtacaatttctatcaaaactagggaacttgacaaaataattccaaagtgcatctggaagtatgaacctattaatactctcagaattacaagaaatacttatgaggggcacttggcatcttagatattaaagaatattttaagtcaatgatgattgaacaatggtattgatacagggatacatcaatgagtaaaatattaaagaaccttgttttacatacacatgtatggtaatttagtatatgataagattggtgtttcagattggtaggaaaaagattaattactcaataaaaggtattgggacacctgcaaagtcttctggaaaaataaagcagggtctctaccacactgctaatatagaaataattctagggatcaaaattatacatataacaagataaactgtaaatttatgataaaaatctatggataaatatttttacaatttatgtgtatgtggggaagtcatctctaactagaaaccatgaaggaaaggatttaaaaatgtgactacatatacatatgttttacatctttatttttcaaaatgtcagcaaccatctcaacttgtttgaaggacagagcatataccgggaaaacatttacaaacaatatgatcaacaaaggctgatatttccaaagtataaagagcttttaaaataaactctgacaaccttatcagcaagatgaacatttaataaagttgtggagttaaaataatgaatatggggccgtcaaacatataaaaagatggtcaaatctgtcagcaatcaaaagtgcaaattaaaccaacagtggtatattattaggttggtacaaaagtaattgtggttttttgcatcaaaagtcatggcaaaaaccgcaattacttttgcaccaacctatatttctcggtaactaaaatgacaaataaaaacaagcaaaaagttcataattgatgatgctgtgggcaaacagtgtagttttttttcaaactgcactgaagggccatattttcccagtctgtttttgacagatatgattgtaacatacagtaaaaataagtagccagaaatcaaaaatcacagatattcggaataaaatatcaaatatgacacacatgcacacacacacacacacacacaaaatgttcatcagacataaaattaactctctcaaagtgcgttaaatatttctaaatgtttactctcaatttctggacctatctcagtggaccagtcaggaacattttgcagtctagcaccattctatggaccactcttagaatagcactcctttaatgtgccaatgggaacataaactgggtcagactttgtgaagggaagattggcagtatgtataagattttaaatgtgcaaacccttctatttctaggaatttgttgtaaggcaaattggatagttgtgtaagattatttatcctaacatctttggtgatagagaaaaagatgaaacctaaatatcctccagtagggttattggttaaatagttatggtagtcagactgtggaatactatgcggtcattaaataattaagcaaatgtatattcatttttcattatagaaaatttcaaatatacacaaaagtagaatgaatgcctaaaccatctccatatgaccatcacccagcttcaactgttacccagtcatggccaatcttgtccctgtcccttcgattagttgtgtgtttatttgtgtgggaagattatcttgaccttttgtaaagaaaaaccaggttatagtggagcatttatttactcgttcaacaattatggattatactcttatgtctgttgtggtactattctaggagctggggcttcagaagtgcattaaagaagtaaaaatctcagcttgcagcttaaattctagtggggaagatggaacaaccaacagtcaaaattttagcatattgttactgattatcattacagagaaaagggggaatagggagcagagggtgtgttgtcattttagaaaagattaacagggaagcctacccaccccggcctgagatggtggtctttgagtcaaggccctaagttgctaaggaaggattacatgtcatctgtggggggcgacctcctcaggcttttgggggtgggaggtagcaaatgccaatgccataaggcagaggtgagcctgctgtttctgaagaagagcaaggaagccccggattgaacatgaggagagtgctgggagattgggcaggagggtggcgtagggaggagggtcttatagtcttctgtgtggacttcgactcctgctgtaaatggaatagggagcctttggagaattgggacccaagagtgctgggatgttacttttgagaagactcacgttggctgctgagttcagagtacactgtgagggagcacgtccagaagaaggagaatcaggaggttatgttcctgtgtaatcaagggagattgggggatattgattttaacgaggtttggagggatggaggtggtttgaagaggtgagattctcgatctcttttgaagatagagtcagtaggatttgatcatggattccacgtaaggtatgaggaaggaagaggtggtgaaggggattccaaggttttgtgcctgggcaattgaaaagatggaagtgctatttgctagaatggggaagactgcattatgagaggtttgaatggagaagatcaggagttggttttggatatgtaaaatcatgattcccattaggtgtccaaaatgaagacagaaccaggagttagttggatattaagagtctggaattcagatgggactaggctgaagatgtgtaaatgtgggagttgtgagtctggatgaagtcactagaaaagtgaatgtggacaagaagcaaagacaagactcagaggactgagtctaagggcacttagagggtggggagatagggaagaatcagtgttagagatcagggataaagtgagctaatgaagtaggaggaaaaccaagggcatatggcgtcttagaatccacctgctgagtgtttcaaggagggaggattaatcagaggggctgtcaaagaagatgaggactgaaatttgactgaacaggaggctggtgcaaaagttggatcagcacaacatgtcagcttgaattccttgctgaggtatgaattgtgaagcatggaaatgatgatgatgataatactaattattattaagaattcaaaaggaacaagatcttctttttttttttcaagaatgccaaatatattccctaccattaaaattggatatagcagccaaaaaagaaagaaaaatgaattaaaattactgaaagacaattttacatgtcctgtcagatagtttaatttaaatataagctggttgatccaggtgcagctgcccaaacttggaataacatgggggaaaagcctagtgagaaagcaaagccaattgcaggagagagatacagagtgatgagagagagaggaagagagaaaacaagagagagagagagagagagagagagaaagagagagaggagaaaggggtagttgaagtaggttgcataggaaaaaccaggtgcctggtaaactttattgagtcccagaaatgtaaggtgccccccaccaaaaaaaagtgttagctgctcttaacactaactttagcctgaatagacttgaaaatgtatacatttttcatagatgaatactttccctgatacttaaacaatatagcacgatcttcagagcagagatgtgaatttgtatccctgggtctaaagtattgaacatttataaaatggtgtggctataagagtaccagaattgtgctggagtttcagtttcttctttaggcagttgatttgattaaaacaaaagaaaacaaaaataaacaaccaactcacacttctggtcctttctctggaaattatgaataaaaatatcaataaaactttaaaatagaattttagcagtctccctatttgagaaggagaatctcacaattttcactggtaggcaattcatgtgggattgtaatgcatgagtgtgggaaataaataaaatgattgcttttttttttttcgtaatggcctaaaatgatagcttcttgatttaataaacctttcccctactccctaccaccacccctctgcaacttacctacaatacacatattctagtgcttatcaaattataaaagctgggctcatgaaataacaggaggatttttgttttctgatatcagtcaaaaattgtttggaagacaggcagaacaagttaaagtgaaagcctaatatagtgaagggaaagatttgtgtgccagccacagatggactaagttcgttctcacataaatattatcctttttttcttgccaggactgaactgcagtcattgtcttaattaactcagggagttttcagttacagcttcaaaatctcagtcttctggaaattgtcatctggctttgtgttgtccctaagtagctgtgtgacctggagggaggcacttaaccaattcaggcctcagtattgggagtcaagggtatggaggcccagtttagctttcttctagccctgatgttctgtgaatctgttattcaagtttatggacaagttcccacagagaaggttagtagagttttttaaaattattattattaagcaatgggtattttactaaacagtactcaactattttttgcaaagtgttaatttgtagaacgttttgaaactccgcatagaaaatgaatgcacaggtcaaggctaacatagcctttcagccatattgtctggaattgttttttttttaaaacatataataaaaattaaagttgaagaagaaatgccaaaaatatatttttgatggaaaataacaacttacactgattagcatttatttcaatgaaatatgaatctttaaaacataggatttaaacatctttcaatggacatatacattattgtctcagattcataaaaatgtcttgtaagctatcatttctcctctatttacactgtcttttgtgggggaaataaaaagactaaacagtgtttagattatctctacacattttacatttctcccaaaggctgctgtgtaatggttggcatctgagagaataaacaggaaattagtgaggctgaggttctccttcatcttttgccagggctggactccttgcttcatttattttcataggacaccagaaatctgagaacagtatttaagctgactacgtttcttttatagctggccttttatagatggtctacatgtggcaatctacagattgccagatctttctccttttctccaacttagtgtgttggcatttgaagtaccaaatgtcctcttcaccaatgaatagtttagaggaagatgaacagtgtagccctttaggcatcgtaaaatactgtattttttttcataatcatgaaggtaatatgtttgttatagaaaatttggaaaattaatataatccaaaatcctacaacccacaaatcaccacttttgatattgtactgttgttctttttggtctttcatcaatttttttgactacttgtattcattaagcaggtattcaatttattattcaaactgtttccaaggtgagctgctaagaatgttaataggtgttctgggtcactggggacattgggaaactttccatgtcatatacgtttgggaaaatgccagattgaacgatgttagacttagatttgtcacagacacccccctcagggatgagcttcctgaaagggctctatgactcttctctacttgggaaggtacattgggcaaagcctggaagttattggacagagaactggctttggccctgcacccactaatgttgtaatgtggtgttcttcagatggcagtgtggatcttatttggtttttgtttgttttacgaaattgagatctcatgcttttgtaacctccttttcctacttaatatattatgaatgttttctactttaaatctgtttttcaaagagttgctttctctcattgttatttttgaaaatattccatttatgaaagttccatttatgaagctggggcctagcccaggtgacagatcatttcagtctgtggggatactcttgaaaggttctgtctgggttataaaatgtttatactcatttgaaatgtttccatcttccacccacccattctgacaaacctttaattttggacaactgctgttgaggctgtggattcacagttcccaaagccactgctaatttgtttgctttggaaagacctgacaaaaatagacttcttttaacacaaatggataattttctcccattgatgggcagttcatttaagaatattttatttattgtattataaaaatagcctctttgagacgaatggcctgctccaagtaactctcataaaacatagggattttcttccatacagaaataattactttgatttaaaatgggatattgccttctcaaagtattttttccactatgaagtatatagaagtatgtatttaatgtgtcttaaagtccactagtggaagtattactatcaccttttttcaaggctcattacctaaaatttttctaaaattaaaagcaaagacaaatatgccttacatttagaccaaattaaaaaaatggatctttattttggatagtccctttacctgtgctttactttcattatcacaaaaatatccttaactcttagcatttcataacaactgtgaccaatttttattatgtagttggaagtgttaagaatctgaagagaaggccttttacagtgattatctttgtgaacagtgtttagatacgttttggagacctgttgaaacaaataccctactctttttttttttttttttgagatagagtcttgctctgttgcccaggccgcagtacagtggatgatctcagctcactgcaacctctgcctcctgggttcaagtggttctcctgcctcagcctcccaagtagctgggattacaggcacgggccaccatgcctggctaatttttgtatttttgtagagatggggtttcaccatgttggccaggcaggtctcaaactcctgacctcaagtgatctgcccacttcgacctcccaaagtgctgggattacaggtatgagccactgtgcctggcccaaataccctactctttattgattgtctcacactgattgataatggtcagttcctcaggcataccatatgtctttaaaatattataaaaaactttgtaaagtcttttgttttataaacagcttatctgggctaggcctggagcatattcatagactgtccctttatgcaattcctgggcaagtgcatggctttgaaaaagactggagctgaaaagcataatgtgtacttttggcctggggattctttatagagagtatgcagatttccccaaggaaaactgattttgcatgcaaaagctgtctctataattataacaatttcctcttgccctttttaaaaaaaaattcagcttctcaaattggtacgtataaaattttaccctttccacaaaagcaggccttgctgaaggaactgactgctgaaaaatctcatgccaagtccctaaagcagctaaagggagacattataagttttgaaatgcagcagtctaggaggtgaaggaatggcggtcctgtgagccttgacatcaatttatgtgagtgtgtgtgcaaggtgccatcccacagcttatacttagaagaaaaatggactctttaaagtaaagcttgttaattgagtttttctttttctgagggttgtgcttacatggtttaaattgtaataaaaattaaaatgcttgaaatgttttagagtcggagccctttgctgctttagctcatgggcacctccaagaatgcttcctcagatagcagcacaaaacactggcagttctccaagagaacattctttgagaacctcactgtgattgggaaagggaacttcacattctgattgtgcagaagtgcccgcgggatgtgtagtctacattctaaggttgcttgttgtcttccatggaaagtgttattttattatatctttcagatatgttataggtgggaaaatccgaataactgcttttatcttggtcaggaaatacagggaattggtgtactggggaagatcacatattacgagacacactttaattacctttgtggagtattacttttctaataaccaaacttgttaaaatgctaaattttatttgtgttttaataacccagattgctaaattgctaaataatctaatatactaaattgctaaaataatgccaaacataattaaactttcatttggttctgaacaattttcagtgtccccaagtcattatcaatattgcattaatgtagaaatctagtcatttggcgtccctattaatagaatgccaaacaaattgagtcagacatatatacctagtgttgtgttgcatgcagcagggtagaaagggagtgcctaatcaagctcacaatgtgatttttgctcaagttgtgatgtctggccaggcgcagtggctcacgcctgtaatcccagcactttgggaggctgaggggggcggatcacttgagatcagaagtttgagaccaacctggccaacatggtgaaaccctgtctctattaaaaatacaaaaattagctgggtgtggtggtgcacgcctgtaatcccagctactcgggaggctgatgcaggagaattgcttgaacccgggaggcagaggttgtagtgagctgagatcatgccattgcattctagcctggggaacagagagagactttgtcttaaaaacctagagggacttactcctgttggaggcacacatttctaacgagataatttgggattgacataggactgtgcttaataaggtgttcagaggggtggtgctgatgctaggaacggagaagacaaagtaagatgatggcaatgttgagttaagctgggcagtgacctgatttgtttatcatttggaggagaagtcagaaaaaaaaagaaacagcctaggtagaggattagagatgagtatgaatattgagtgtgtcagggagggtaatgatagtctgagctcactgcattaagatgaagtgttaaacactaataatgttgaagcttattccaaacccctagcttttcccctttttccttctaattactactcagcaaggtaatgagtgatggctcaaatgtgggattaatcaggggaggaagactatcaagttctgttctgtttgtgcatccaggggagaagctgcttagagcagtagccagttgttgtcagcactcttcccccaaccccaaattaaaggcagctttctggaatcatattatggcacctggggaggattaacatggcttcctaagatgcctgagtaacgacatttcttcctgtcaaagcacactgctgtaaaagaacacacttcctgatgatggccttgaccgacctcacgtttaagggcctgtgcacagttctgttacctggagtaggtgatctgtgacaccggcctttggttgctgtgtttggccatgaatccaccctgatgactatgaacttcacagagtaattggccaggatatcccttcccttactgtcatacttgctgaggtgttagttctgcaaatagtatcctttgtggatctttgtgtttgtttgagtaggtgaaggactttattttatattctttttctctagttacttccttattttaataagtaaaccttattctaagggttagtttctatgctgagaacagtgggtctctagactacttaaaattttccataaatcttacgttattcattttgtaaatcctgaataaattgaaacgagaacagtgctgatggtcctcatagaaactgaggtggaatgtgtacacattttaaaatttatttaaatgaggtgcttctaggtataacacatatataaccctccctatatattatttaataataaaaatacctctacactatagtgctttatgaatagatttttaaaacttcttcttctttttttttaatactttaagttttagggtacatgtgcacaatgtgcaggtttgttacatatgtatacatgtgccatgttgttgtgctgcacccattaactcgtcatttaacattaggtatatctcctaatgctatccctcccccctccccccaccccacaacaggccctggtgtgtgatgttccccttcctgtgtccgtgtgttctcattgttcaattccctcctatgagtgagaacatgcggtaaaacttcttatagtataattgaaatgtaaatttagtgtaattaatatgaatttattcatttaatttggattattgatgggcttgattcttcttaatcctaatgaatacttgcaggccacaggtagttgtttagcattagcaaagtttatcttaaattatttcatataattatattttaagtatgattttaggctctagatttggcctttttcaaatttgtaatatgctttatcaaacattaaacaccattttaaagtaatgtaacaggaatttgggaaacagaaaaacatacctcttttataattttagtactttaacataagagccaatatcgttttttgtacattttgaatcctccacatggaccacacatatttatagctagaaatgtgaatatatatatataattttgtattattcttcacttataaaattagcatttctgatattgtatccgtgtgtgtgtgcgcgtgtgtgtgtgtgtgtatggcttcaaatcttttatgaaacaaaatttaaagttatgaaaatattagtgcccagttcaattcccctcactccactccatttcacattccccagaagtaacttttcagaattctatttttcttttctgtttatgtttttatactcttgtctcatgtatgtgtcccttatatgtacgtataagatatatatgtgtgcacatatatatacattgtgcatgtacatagatacacacatgcagagtattgttgtgtattctaaaaatgtacatatctgcaaccattttgtctgcccagttctattccattagttttgcctcacctatccttatatcagtatcacagagctaagactaggatgaggcaagcaaggtgcgctggacatagaattggtgcagacatctgcccttaggctgtaggagcctcggttgccttccctaatctcagccatgacaatagctttatagaaacttttggtatgtggtaggttgaagtcttggctatttttggcccctttacccttcaaataaattttaaaaaacagcttgtcaagttccatgaaaaaaaatcccagtggaaatttgacttgaatatatgaaatttatagattaaatgagggtggggaatggacatctttaacatatcgagtctacccacctatgtatatgctggctctaactattgatttaggtcatttttaatgtctctcaaaaattactttttctataacatcctgcatgttttttattcaacttatttctgcatgccttagagtttttgttgttgtgaatgtgaatttttaaaactgaattttctaattcattgtggttggtgtatacgaaagcgttggtttttgaatgtccctgctttttctgcagccttgcttaacactccaatttgtccgaatttgtctacagattcatttggatttcttctgtagagaattctattatctgtagttacttggttttcatacttgtaacttaatgactatataatacttcattcatcatttactttgctgttgaacacatgggaagttcctgatagcttctattttaaatacaattatagtgtacaccttcatacattttttcacctttccagttattttattgggattcaattttgtaatttctgtcaaagggtgtgaacatatttttacagctcaggatatgtgttgccaaattgctttgtagaaagctttaaatccttttacactgccaccagtagcatgtgagagcatcagttcaaccacattgatttgaatgatggaaatcgcacctggaatgctgtgagtcttctgactgatttcctgtgtccattcctatccgtgcttaatcagtcctccacacagcagccagaattatcttcaaaaatttaaataagattgtgtgattcccctgctgaaaaatcctccaatggctttcctttagatgtagaatttagcctaaacttccaaccaagattcctatattctgacccttttctttcttctaacctgctctgcttttgttctcctgtgcctcggctacactggccttcttgctgttgctgaaacttgcttaccttattcctaccccagggcctttgcattggcagctccccctgcctagaacattctccagctcattatactactacctctacctatcgtgcatttttcttgctcagctgtcacttccctagaacagacttccgtggcttccctttctaaaataaccctttttggtcacattcttttctcttactttattttctttacatattttttattatctgaaattatataagcttgcttattatttatttctttgtttaccattggcttcttcaagtagaatataaagtcctcaaaaaaaaaagctttgtctaaagtgttgactatcattatatatcaaattttctagtggcatcctacaaacattaaaagaaaaaggttacatgtgcacattgtgcaggttagttacatatgtatacatgtgccgtgctggtgcgctgcacccactaactcgtcatctagcattaggtatatctcccaatgctatccctcccccctccccccaccccaccacagtccccagagtgtgatattccccttcctgtgtccatgtgtaccctaaaacttaaagtataataataaaaaaaaaacaacaaagtgcttataaaatatgagaacagagcaacggtaagtgcaatcttctataaacaaagaatttaataaaagagacggaaataaaaataactttaaaaagttaaaaaaaaagaaaaaggacaaattaatattaacttttaaagcatgacatatctaaaatattattttcatgcataatcaatataaaaattatcaagacattttacattctttttttaattaagtcttcaagatctggtgtgtaatttacacacagcacatctcagtttgaatgagccacatttcaagtgctcagtagccacatgtgattggttccttccatatgtgacagtggagggctagaacagaacaatgcctgagacacagggaaaaatcattagagactcgctgaatgggtgaacaagtgaatgaatgaatgaattttatttagcatgtgtaagtaatgaaaatccaagtcaaattaggagtaaaatcaagatcccataaaaagtgatttattgttagagaaaagtgaggcattagcacatatcctttactggaacactattgtggtatctgaatgggctcagttaactgtcacctttattaaggctctcatgtgctctgagcatcttgctaggatgagaaaaataagatgaaattcttaagatatcggaagtctggtgagttgataagaacttgatgcctaactgtgttgtacattgtacgtgttactgaaacagctgtgggcatcatgaattaatttttcccaggcttttattcatattcaaaagcttagactaatagtcacattttattaagtacattttatgggcccttagcattttgctaaatgctaagggagcaagtatttgccctcacactattttaatgtgtatttctctaggttacattcttaacttacctgcactatcctccaagcataattcttcaaattttcagctgtattgagattctaaatggacttccaatgtggacttttcttcgttttcagcttataattggcaagttcccataggaaaaaatcattattggtgctataaaagtacttcttatctgtcacatttgggaaatgaaagttttgtaaaggtcaaaagaaagtgtgcccccaattatgatgaagacttgtacatcatcacaaatagtttaatagcttggaacttatcttagtctctcttacagtgtataaagagaaaggagaaaaaaaaaaaaaacaaagtagtcactccatagcaattttaccatacagttttaggagagatgaaaaggatcccatcgaaatcatttgatcaacatctatctatatcttctttgtggtttggaactgtttaagttatataagcctacaagtttattagttcacctttattaatttgtcaaggttaatgactgcataatgagttgaagataattaaagatttgttggcaaccatctgctagtgtttacgcagtacggtaagttttataactcatcttgtaatgtttcctaaggagattctttgccaccttactaattttaaaaacacaaaccacgctgttgccttaggcagtgtaagaattcttttccttaatcttttagcatatgacagcctattaggaagatcagatgatacacctctaagaagccgggagtgtgtttgcagacactgttgagagtggagtgataccagccggtcggacacatgacctggcagttcccctttctttcagcaatctgctttggcagccagtctgcctcgggcatctgtgctaattattctgccccagcagcagagctgtgggcactgctctaagaaggatccctccttgctctccttatgtgaaggcccatctgcgttacggaagtgaacaaactgactgagtgcagtcttctcctgagtgcctactgtgtgcagcctcattattaatagataatgaagatagccatgtcagattaaaaggagggattgggaacagttcaaggccctctctgaatgtcttattcaaattcccatttcatctgttctcccttgacacgctccttttctcaaactcctgaactcaagtgatccacccaccttggcctcccaaaagtgctgggattacaggagtgagccaccgtacccagccgacctgctccttttctaaacctctctcttcttcctttctctctcttagcaacatcttgccatctccccttctctctctttatagtgagtaattactagttgctctgtattctagttccaaaatctctcccatgttcatcctcttggatccattgtctgggtcaatactacttctcatctgcagagtgtcatttgcttcctaatgggtttccccatatgttcctgcactcccttgacccaagctcacctccactcaccttctggaagcaccattctgatcccaaggtgccctgctgcagtcttccatgggtttccacggccaggtgaataatgtcaaaattccttaactagaccgtcaggagcctcctcctccatgctatgaggtctccacctcactcccagccttatctgccttccctgaactgaatggtccctaaacaaaatgagctgctctcttttggtgtttccacctgctcttgaggtccccacctgagctgtcctttgccccacatgtgttgttgtgccatcacagctctcagccccagtgccatctccctgaagccctcctcacactggaacctcaccacacccctcaccgggatgatctacccgtcttgaccatctcctggctctttagatctctctggaaggtctcaaagcttttccctttgttggattttatccacacaccattggaggccctacctgtcaatttccagaaggcagtgcgccattgacccacttttgtggccaccacagtacccagagagcacttggaattcacctaacacctggatgaatgtttcttgaatttcttagtccctgatatggaatattccttgctctctattttttttaactagtttttttgtttagtaaccatcacccacaatgaccagaattttctctccttgcttctggcttctccacagggctctgaacgccgcttacgtgtcgtcccacctgttctctatttttgccctaatttctcaccattttctgtttcttctgagttgtccattctccaccctttaatttcaattagtcagtcgtaaatatttgtccctatggcaggaccagcttttgtctggtctaaatgtaggaagtggcttgtttataatttcctagcacaagtaggccagttactgaacacaccgatataaaatgtactactagaatattcagaaatcctttagggagaattgctggttttcctgtgaaagggaaagacaagtcttcagtggaaacagcactttaatatcaagttttgaatgaactgtattcatttcattcaaaactcagctctgacaaatatgggtaaaggacatcagtttcagaaatgcaatgcaatgcttgcaattatggaaattatttcatgttttccaattgcttatattaggttgattatatttaatgtttattcctgacaccaaatttatgtattttagttataaaatttgtgaattatagctgcaaaatattatagttttcaagtcgaattattaccagcggcattcctgtcaactttgctttcctcaggactttcaaatagaaatgttattaaatatttcctttttgtcagtgtttgcacttgaaggtaaatttaaacatgagtgtgttgtttggtttctctcattgtggatggactagctagtttaatatttaatggcaagttttgatgtatactgataagaagagagacaaagaaacattattgtatttaaatattatctttctgattgtaaaagtggtgcttgtcgtagataactctgtaaattcaggaaaacataaaaataaagatcactgttgttttaccacacacaaaaattactataactataactcgatgttatatacattacctattatatactgtattttaaaataaaattgggattatattggacatacaatcctgtttttttttctgttaacattatattgtgattacgtcctacgtgattttgttttaaacatggtttttaatggttgcatacctttaaaacaggaagaattataagttatcccaggaatcttctgttactggatacttaggtgttttgtttcattgctttaaaatcatttctactcctcttcacaatgtggatacttgggaattgtcacatcatagtcaatttcacaagacaatatagattaactagccatgcactcttaatgtacatatgcagtatttcagacattagaagtagggagatcagttttgcttgatgcaggcagttaaaaatcacgcgcatgtaaagaaaggaccaattttacttgcctcagtgttggcccaagtttggagactaaagcatttacagaccattagctctatacttcactcttgagaccacttgttgtaatgagctgtcaattattgtgcatctaagtgtagttaaagggaccattgggcttgcagtttaaaagccaacatttataaatgtgtaggaattgaattataaatgcagtggttcagtaaggatgtactgcatcatggacctgtctggatacagtatctgttctctgaaagattttagtgttcattaaaaacataagaaacagtaaaaatgtactcttgagcatatagctatacaatttttatgtttttacaatatagtttgggaaaaatatttttttaaatcaagagattttaaaaagtaaaaaacatttctttactaaggtatttattaaatatgcaatgaattaatttcagctgacatgttggagtgaggagaaggatggaaattggagatttccatttgattcagtgaagctacagtctattaaaaaaagtatattcttcactacctgtttatcattagtttttgaatagtatttgcctttgaaaatctgtgtactttgaaaatattttactgcagcttgtaaatatggcctgagtaacatttcacattttttcatggttaaagatgccttttgctttgaatgtgccaattctaaatatcactcttttaagaaactcctggaaatctcctctttttttttttttatatatatttcagctatttaattttatcatgttcttaaagtcaatattttgtatgtgaagagtgccccttaaagtttatttcttctttttattttttaacatgaagtaatacctgcttgctgggataaacaatatagatgagtaaaaaatattttgttcaattccaccttctctcttcattttctcatcttccctagaggcaattaccatgaacaatttggtgattatttcttcagatctttcacccaaacttttacaaagataacataggtagataagtaggtagataggtagttgttgatcacagatgtaaaataggttttcttatataaatgacttcatttctttcaaatggtatacaaaacctgtataacacagttatttacagatctatgttgtatgtagctgtcacaagcaggagttggcagactttttctgtaaaaggccagaaagtattttgggctttgtggagtataccgtttgttgtgattattcagtgttgtagcacaaaagcagccacaggcaatacctaagtgagtgggtgtgtgggactgggttccaacacatctgtatttatgtatgctgaattttgaatttcatataattatgatgggagttgaaatattattcttcttttaatttttttcagctatttaaatatgtaaaaaccaatcttagctcttgggcttttgcaaaagcaggtgactggcctgatgtggcccataggctatagtttgccaacctctggtctagaatattaaaataaaaatcatttacaaaattaaatctcaaccgggtgagacagctcacacctgtaatcccagaacttcgggagactgaagtgggaggattgcttgagcccaggagttcaagaccagcctgggcaaaaataaaataaaaaaataaaaattacccaggtgtggtagcacatgcctgtagtcccagctaattgggaggctgagatgggatgggaggatcccttgagcctgggagttcagagctgcagtgaggtatgatggtgccagtacgttccagcctgcgtgacagaataggacctgtctctaaaaaagtaaaatcttatattttgtaagaggtaaatatcacagtgagattggtgaataaaggcaaataaagaaaatacctcttttatagaatagtgatttaacactttacagactgtgaatgagagactgtatttaagaaacaagcaacaagcaatgataagagaaaaaaggcagagaattagctgatgtgaggtttcaagtactggagagtccaagggggtcttagtgttgtgaccaattcacaaactcccttggccattccccagggagaaatattcctgatcccttttaacattatgcttttatttgcatgtatcatctttttatatgaactttgttttgcagtgttagttgataagtctcatctttgtaattgacaattgtttttatctcctgtattgtattttaaaaagtttattatgaagtgtttatattacttataaggaaataaaatagttacattgaagattgcccaggaaatacatttcattttaaaccttttcaaatagatgcattgtaatgttaagcctggccccattaatttatttcaagggatgttctctgaatgcctgaaatacgcttgactccatcaattcaccaggcgtgtctcttgatggcaattctgctttcagaccaatgagaacaccgtgatccagtttagctgccttctgaagcaattgctagttttaatataataaaaataaaacaataggatgtgtattgttctacctgtgaaactgtcatttttccactaaaattacaaaatgcaacatacaattcataaaactaaaaacttatttttaatgaaataagaagcagtttattaaggtatattatactctctgattttatgcttggtatggaacttaatgaatgtgtgtggtaagaagtaaaaatggattagttgtgtgttttttttcaaaccacttgttccacatttttaaatttcattttcttcacctaaagtagagaataaaatagtgtgttatttttccaatgtataacttggcaatttagatataactcgtaatgagggatattcctactagacaatcaaatataagaatctctttatatatgtatatgaatgcacacatgcatatatgaataagggcttatatcttttattcttcttagaggttcatggcataaaatttagaaactagagaccaacataaggagaaaataaaaggatgtgtatttttaccacccagccatagccctattgatatttgtgggactaccttccagtgtctcgtgtctgtctctatatgcgtatacacatataattatagttcagtcctttatttctcagtttatatttgttgcttgtctactatgtgccaggcacaatgtgaggcaatagggacatgacagtgaccagaaccatcccctctttccctgaagtttactttgttgggggagacaggcattaacctaaggtcactatgtgtctagtagtaatgagcactgtgaagaagattaagaccagaaaaggggacaaatttgtgtgtgtgtgtatgcatgtatgtgtgtgtgtgtaaaagtaaagacagtaatgggattgtactatccatactttttataacttgcatttttaaataaaaacaatattaatatttttatttcactaaatatacttctaagcaagtgttattttgaatgctatactctacttttctataaacgaattaagtttatttaacaagttgtctaatattgtaaacattgtttacttttaaaaattgctattttaagtattgctgtaaggaatgtcattcactgaagacacgtgtttttacacatccctagaataaattcctagtagcagaagtactgggtcaaagaatgatcatgtgaaggctcttgatgtgtgtttgatatgttttaaaatgttatatggctccttcatgactcaatttgttttccttcccctagtccccttcactcttccttccatattttaagttttaaatctaagcaaaagtagatcgtatacttcatatttaaagaactctttaacatgttaccatgataacatattactttggtagtgaattttgtgttttgtttctgaagtcagattcttattgtgagtgagagggctaatgcacttataatataattgcatcattgcacaagctaacaaagtcctattgttgcttacaaagttggtatggaatgaaggaaaaaatacattaagcacaacaaaccagcagcagccttggaaatgcaagagattcagagcaagttttaacatgtcatttcatttgctttttttttttttttttttgaggtctgaaaaaagtctaagaatactgaactgcatcacaaaggaagcattcagtcttgagagaaaaccattttagcttgccttatgatagatttttctattccagcaaaataaaataaaatgccctactttgctgtcactttccactggttttctttcagttgacattacctgtaatactaacagtcataagtcacatacttacatagcatatcctctgtgccagatactgtatttcctcattttaaagctagatgggaattactttccacaaaagagagtggacgttttaccaccaaggcactagaggtttagtagctctaacccttttcagaaatcatagacagaagtagaagggcggtgttaaagcaatgctcattgaactctaaggtgtgcacaaatcacccgagtatcttgttaaaatgcagcttcccaggcagcaggtccgggagcctgagactctgcatttctaacaaactcctagggaaagccatttctcttggttcaaggaacacgcctcacataggaggcatgaggtacttcatactgctcatcctgaaagccacctctgtgataaaataatagatgattaaaaatttcttatttttatttttatgtatcttccaagttttcatcagtgatcatatattagtcttataatgagaaaaaaagtgaataaattgattttttaagtagagtagtccctttccccagatttctatggatggttttccttgggcctctctttgaagatctttgaggtaggtctttgagtgggttgttagacacttcaggtgccctgcccatactactcaacatttaacttttaaaaaaaacggtggtaaaattatctatctatctatctatctatctatctatctatctatctatctatccatccatccatctatctaaacggagtcttgctctgtcacccaggctggagtgcagtagcacaatcttggctcactgcaactgccatctcccaggttcaagtgattctcctgcctctgcctcctgagtagctgggattacaggtgcctgccaccacacccggctactttttgtatttttttagtagagacggggttttatcatgttggccagactcgtcttgaactcctgacctcaagtgatctgcccgcctcggcctcccaaagtgctgggattacagacgtgagacaccacgcccggcccatatttttgatatgatatagtttggatgtttgtcccctccaaatctcatgttgaaatgtaatccccattgttggaggtggggcctggtgggagatgtttggatcatgggcacggatccctcatgaatggcttagcgctatcctcttggatgaggggttctttctctagtagtttacatgagatccggttgtttaaaagagtgtggtatgtcccctcttctctctctctcagtcccactctttccatgtgacaccacctgctccctcttgattgtaaacttcccgaggcccttaccagaagcttatgctggagccatgcttgtacaacctgcagaactatgagccaattaaacctttctttataaattacccaacttcaggcatttctttgtagagataccaaaatggactaacacaccatcttaaccatttttttaaattagtttttgaaatagaatctcactctgtcacccaggctggagtgcagtggcgcagtcttggctcactgcatcctctgcctcccaagttgctggaattacaggagtgtacctccatgcccagctaatttttgtatttttagtagaaacggggtttcgccttattgaccaggctggtctccaactcttgacctcaagtgatccacccactgccttggcctcctaaagtgctgggattacaggcatgagccaccgcacccagccagtcttaaccattttttaagtgaacagttaagtgacattaagtacattcacagaattgcacaaccatcattactattcatctccagaactttttcatttgcaaaactgaaactctatatccattgaacagaaacctccattcctccctcccccagctcctggcaaccaccattctattttctgtctctgcaaaattgactactctaggttccccatataagtggagtcatatagtatttatcctgttgtgtctggcttatttcacttagaatgatgtgctcaaggttcatccatatggtagtatgtgtcagaatttccttgtgttttaaggctgaatactgttccattatatgtgtataccacattttgttgatccctcatccatcaatggacacttgggttgcttccaccttttggctattgtgaataatgctggtatgaacatggatgtgcaaatctctcttcacatccctgctttggtacttagcatttttatgcccaatttccaactgcctgcatctgtgtcttcttacctgagggtgtcttctgaccacctgccgtactcacatatgggccgaaaagtcagtccccctcccaccaattaggatagaaattggtgtataactataccaggtcccttgcttctggggtggaataactggagaagtgtattcttcacatttccccgagttccccagtgggatcagaccgcagttacccttggtggtaatctgcttgatatcacattctatactggcttccttccctggttcacttttcctcagtcaccttgtgtttcctggaatatttcctcccaaataaacttcttgttctcaaatactgacttaaggtatgcctaaaggagaacacatctaagggagttaaaaaggtgcactgtgaatatctatttacacccagggatactctctttttggagagcaacagtgagatttcaatatgtgtggtggattcttagttgggggtacatctgccttcccaccccattcaagtgatgttccgaataaaattaaatctgttcatatgagcatttaaaccttgttgtaacattttatacacatgttttcaaaactctatttttgcttcgtttctaactcaacaacttattctcccaatttaattaccatacatggagctggatcccgaagaaagaagaaaaacagctctacaaacaaataggtcttttgttggataggatagttgttttctatatatagattcttgtttcttccttttgctaccatgtttagcctctggggcttctcttggttgtatctagtttgttgttcttggctcattttggcattctctgtgtattgtatttttaatattaaattatgtatttagcagcaagcttagaaacagatgaagtttcttgtactagagctgctactcaagatgaaaatgcaatgcagccgacaatgtaagtcagagctgtgcttcagtgtctttgggggtgtctggcttctagggaggtgtgaagttccattgatctttgggagctgttaatgtaggagattagtttaagtatttacacaccaaccttatttaaggcagctactgcagaaactcagtaaaccatttcaaagggaaaatgtgtgcctttctaaaaactgcagccagcttccacactccccacaccaaaaataaatcttttaattgtgtatgatgcagtagatgcatgcatacttcaaaagtctgcctagatcttcctcttctgaatttaaaagataaattactctaattgctgtgtcgtctagctggtttatagtaaatgaataactttcaacgtagaaagcagttacagctacagaaaatagacagtaatgtcactgcaagtgtttcctctttaaagtcattgaaagagtatcatagcagatgttttctgttttggactgttttcccatgaaacccatggatgacgtttgcacatgataatttatctccttaagttaggaacaaacttatctgatttcatatactggaggttggaaatcctttttgttaacttagcacagtggtaactggaaaaaataagctttttaaaaagtaggatgaattgaagttgtgatcagataagcaagaagtaatatgaagcccaagcaaagcaaacttagtcattgtttctctgtgccaacacagaccatcatattcattatgtccatcaaaataggggaggtctaatttagacagataaaatgaagtccattcttctttgtgaaaggaatcggagagtttcctgggaaaacagctcagcctctctaagcctcttgcatgtccatgggcctcatggccagcatgtaacagcatcatgtgaagttacattgcatgcttaggggtggtactaatagcataacttgactctttttttttaattcaaggagcaataactgactttctactctgggccagatctgctctgttctgaagatacctgagaatgatcagttctttctgtttagctagtaatctttcggtacatctattgccccatcaattgatttatcaaccaattgactaactgatcgatcaatctctcttccctctttctctccctttttccttccttccctccttctttccttccttccttgcttccttccttcttttcctccctccttctgaaacaaaatattaagctaaagctagagtcaggcagcttcctgaaagttgagctctgaatcttaccttgggtcctcagtaataagatattattggatctctgtgactggtaataactttacttgttgaaggaatgagattggctcctttgagtgcagttggtggttaagggcatagcctctgtatcagagtgcttctgtttggcccaggaagggactaacgtgtatggtggttgcagttttaatttgatatagattgattcatatatgtagtcactgatttttaataaatctgttggttcgtagttcaaaaagtctgggcaaaagaatctggtttacaaggaaatcctgttccaaccatggtagactgttacatttggtgaccctgctgaactctgcctcctatcactcatgcccttgtctattatattcctcattgactctagacttggccatataacttcctttggttgatgggacattagtaaaaatgatacaagcagaggcttgataatcatttgggcttgttttcttggaatgctgcttcttggaagccaaccttgatgctacataaatgtttggactagactattaagtgattggccacatcgatagagaccctgaatgatgagaggccgtctcgcatgttccagccccagtcaaactcccaactgactgcagtctattgagtgacctcagctacaccatttacaacagaagaactgcccagctgagcacagccaacttaatgaattgtgaggaataatttattgttgttttaaattactaagttttacagtagttagttacaaagcaatagataactaaaaccatgtcctactttacatggtctgtgcaaaaggacaaaggggaccttgtgtatgttgtggctcatagaagactgcatttcataatgctatagtgccattaagagcatagtcagcaagggcataatgtttgtgtgtgtgtgtgtgtgtgtgtggttgttaaattgtgagatcactgcttctacctttgcaactgaatgtcatgcagtatttttatttccacatagttatacttaaggaagctacctttaagagtaatagctcttttattcattcaggttgtgaaagacactgagaattatgaagaaaagagcagtgactccaagtcctacaacctagagtccaactttaggaagttttcatattgtaaagatggttaacataatgaaaaactatacttgattcttattcataagcctggtgaataaattagtaaattagatccagttgagagtgctgacactcttgatatccttataaaagtgcttgtaagcatggacacagatatgtggattcttctattggatttatcgtttgcgatgcccaccactgcatttcattctctacattgcaatcagattgctttttctaaacggcaaatttctgacttatttctgcctatacaatagctcctcactgcctctagggcaatggttctcaactaagggcagttttgcttctaggggcatctgacattggagacattattgactatacttgggcactactgtactatattgtagtgactaaaatagagatgctactattttctagtgagtagaagccagggatgctgctaaccatcccacaatgcccaggaccaccccccgacaacaaggaattaaccagcccaaaatgtcagtagtgcctctgttgagaaacactgctgtagggtaaggccctaactcctagctgatgcttccctttctaatttcatacctctgacctttggctcatacttgtcatgtatgcttcttatgcagcagcaaactacttcctattttgatatcttcttacctttaggtctttgcttatgttgttctcatagtctgtgggttttatcattgtgctttgtgcatacttctgtttttctgatcacactgagttgcaattacttttttttgttgttgttgagatggtctctcgctctgtcacccaggctggagtatagtggcatgatcttggctcactgcagcccccgcctcctggattcaagcaattcttttgcctcagcctcccgagtagttgggactacaggtgcacaccaccatgcccaacaaatttttgcatttttactagagtggggtttcaccttgttggccaggttggtcttgaactgctgacctctggtgatccatctaccttggcctcccaaagtgctgggattacaggtgtgagccaccacacccagtctgcaattactttttaaaatctgttgtccctacaagcttgtgagttcagggtgagctagcaccaggctacatggctaggaagtatttgatggaaagaatgaatgtttgcgtgagaccactaccggaaaaggggctgaagctgcataagtggatagctgacccaccctcagcgagctttcctcacattgggtgaatcattcccatggaggcactgtggacagcagctctccctgtgcacatgattttaatgccacttcacagtggttcttcctctgtctttttgtgttttaaacctttaggagacatcagtgtcaactccaggtgggcttcacaatactccaggtagctttgagagacaacgtaagacatgcaaagagtgtgaagacaaagctttgtgcctcaaatgtcctactgtaaagaccagggcaggggagaatttttgagaaatgaaggactggttcaaggcactgtcttttgccccaaggcggcattaacattaatttagcataatatagaccagttattctcaatcttgcctgcacatcagtatcatctgggttcctcaaaaaataccattgttggtgtccagccccaagagctattggtataattggtcttcctgagtttcagaatttttaagtttcccacatgtttctgttatgcatccaactttgaggacaactgatatagaaagtagattatagatcttcaagttaacatttccacagtaatttactattttccttcttggtaatgtactgttacttaataattttataatttttagcataagtaataaattagtacttctaacttcattcaaatttataattgcattaatttaattaatatgtaactttttggtaaatgacattgtataaccccattttttttaatatccttctccctcttggccctgaaactcagaagaaatatcatcaagaagcagctgacccgtcttcatgttggtggaagttggaaggaagccattttttagatagtgtgcccagaaagacacaaaattagaactttccttttggttcctgttctgcctcccgtttccaatacccacagttctgtttgcctaagagaaaaagtaggagcatcccccatgatcccagaaagtccttctcagaggctaattgttactttttatgttttttatttgataaccaatgttatacttgttatgaatgtgctagttaggaagaaaagtgaaagagctgtctaatttattctactcatcttccctatttggtggttggaatgaattttggcattattttaaataggaaagctagaaatcgtagttttattcattccatgacactgtatgtcaagcaccaattttttttaaagtttatgaaaatttgggatccaatgacttttgccattgagtaggtaagcactgctgtagaatggctccttttggcagaagataatagctttcaaggcaagaattataatcatttaagctgtagaattttagattactatattgtttcatttcaagagggaatgttagggtagaaagaaatggtcaaaatgatatagatagtgcaaccctcccaacttctgcacaatgtgtgtgtatatatatttatatacacacaaggtttttatttgtcaagtatacctcactagagccaaatatacaatttaactttaacgattatataatttttatttgtcaagtataccttattaacactgaaaaaacaaactaacccccaaacaaaggcaaaagaaaccagaacaatttgtacaccaaaaacaactaaggctcagagtaattattgaattcatcggttgatcattttttatggaatatcctgggtctgcctctcttggaagtgctgtgttgggtgtgaggaatgaggtggtgaaatgatttgcccatggagacatatgaagttacagcagagccagaactacaaagcacgactttgtttcttgagggtattaatttataagaaatttccaggcttgatttttctaatttccccaccttgattttttataggtatatcctataatgggttaagagggtttccaatagatgtttatgcaaggtttgtgagttttaaaatgattggttatatttatgctgtcaaacctagaaaatttgattaaaataatatctaatagccatttggttaataagttaaatctttactttctaaaatttcttttttctattgtatagaaaagcacattttgcttttcctgaattacctatgtctaagaaaatcctctgaagaatggagttgtgcgtaagtcctagtactgggacacataattcatgtcccttttactgctgtaaatttttagcaagcttttaggttggacaagaaacttagagctccccttatctaagttcatttgacagatgagaaaattgaggcctggggaggttgaattatttgatgaagtttacagagctagtctgaagccaagctggggactagaagtcaaaactttttgaccccaaggtcggtacatttttactttagtgcagagtaaaaactgtaggcagcatttcttatacacataaatgcacacacacacacaccccacacacaatatcctcacactctaaagtgagtctattttcagaagtgtgggttgttagttatgcattgtcttaggttggcttctcccaaagctggtttgagtcaaggattggagtgcaagtagctcacttgggaggtggtcctgggaagcacccgtaggggagtggaggaagtgagataaggaaggaaagtcagccagtacagtgtgtgccgataagcagattccactgtgggcaactgaggctcctctgtgctggggcccttttggagactgggtagaatatgcttccgagttgtcccacaggaaaggcaggcaaggagctgggctatttatttaccagctcctaggtcactgcttgggggcttttcctggaagccttactccttgcacttgtagctgaaaagtctacaaaagagggtttcagttcctagaggaaggctttttaagtgtggttgataactgaatcagtgggaatgtggagggattggcagatcactggcaacttctgtgtgcactcagaaagaattgcaaatgggtgtaagtgcatattctacacacagtcgattccaatatgacaaacaccttgtctttgctctttcctctttccatcatatacttactgctttcatatgggaaggatagagctgagaaataaatattgaaactgataccatcagtgttggatattctgtttgccccttgagagtcactcttcactttctccagcctactctcctgaggctgggcattaattgcaacattggtgagcttccttgccctctggctttagaatgggttcaggcagtgggagcttctagaggagactggagggaggagaactgtgaggtcagttgcttaagagactcccgggtctcttcttgccaacatgctgttggttgactctgtccccctcctagaagccacagtcgaccaggaagatctcttctgtcgttctaatactattcttggtttctgtagctctgtcctcttactccttcaggcctaggacacgtcatattccctgcatggtttccctaatccctgcccacacctggtaaataacctcttattaaactcccttgttgccccgtttgagtgttccatctgtttcctgctgggaccctgaccgaggtaacatctttgaggcatttactctctagacagaatcagatgaaatgaaacagctagagatgttatgaaggtataagataatgaggcataaatcgtactcaagccctaaggatactcagcatgtaggatccattaacaaagaagggttacttactaaagaagatgttttttggaggggtgccttaggttgtaattggtaatctgtttttctcctgctctgtgggaagctctgtttaggtagtgaattgaaaattggattctgccttattaccatgtatgcagttaattataatgtatttaactctataaaatggaaaatttgtaattcaaagaaatagaagggtgaaatggatctatccatctggaaatttcagagatttctctcatgtgtgctaattttagataagtaagtattttccccttaattccttatgtttctcatccctttaatgggttataatttatttttctcaagtttttttttttttttttaagttggtgtgaaaggcatttcaagctgcttagaataaggggctagcaacagaaaacacccattctgtatgtatttacagagggcctcttgtgattcaggcactttgcttaagtaccattaactcaataatgaatgatatttgatcattgctttcaaggaaatcacaatgtagtttggaaaatagaagcccaaacaaatacttgtgacaaatatttttaagtgttataagtatgtagagaattttacgtgcatataaatgaggatttataagtaagtctgtcaagaaaaggcagagaggttagtgaatgacagaaatgtttcatagagcaagtgacattgagttgggtcttgaaggatgataatgaacgtatcaggaagataagaggaggaatggcatgaaggaaggtgtgcatttcctggtggcttgaagattcagtgagaaatatgatttgggagaaatgttggtggcctttggagaaatgcctggacttcggccataggatagaatggtaatctgattcttaatatgcatcatcacttaaaataatatagactaaaaatattagttaaaatatactctaaaaatattaggggagtgtaaacaaaacaaaaataatatctttggggatctttagacatttagtgggaaatatattgctagatatcatatagcacatgttttaaatactgaaaaatgtatgattttaattcaggagcatctcaaaacagggagaagacccactggtatcttctgtcactacacagctttgctcagatttgtgtgcacttatactaaatttgccattacacaattaccttctatcaccatagaattacctaaaatatgaaaatatgatgggttgcttggaaatatggtggattgccttttctatttctaatgattatattagcatccatacttcacaatcacctgtttagcagaacatatctggatacaccaaccataagagatatttgtgccttattccttctaattattctagtccctaaagcttaaggggtcagcagtcttgatgttataaggtgggctaattgatgaagactgtcttatcattacaacagttatagatgcaatgaatttttgagtgctgcttactaagtaggaaactgataaacaagaattccactccagaggcatgagcaaaatggtaactatagtacatgggtattatagtcaaagcctttgtaaatggaaaccccttaaaatggtcatgttaaaggtcattatattgtctagaaacttgaggtctcatgaagtacagggagaggaacaaagtccagtcaggtatcatggaactattaatagaatgccaacgtccagaattaagcttatactccctgtcatgcagagaatgtcttcttgtctatctgttttattctttccttatcttgtttgctaaccatgttctatctatattctgttttagttatctcttgctttttaacaaaccactccaaaacttactggcttaaaacaaccaccaccatttagtgcctttcatgagtctgggtggtaactgggctcagctgggcagttcttctgtttcatgtggtgttggctggggctcaaattctctgggggttcatatgagctggaatgctcaagaggactcactcacatggttagtagttgatgtgtttattggatgggagttcagctaggatgccagctggaacatctcagttctgttccatgtagtttctttccatgtggcttgggcttctcacagtgagggagctggcttccaagagggagcttatagatgtgcaaaagtggaagttgccagttcccttaagtcaagggctcagaagtcctgggtgaccactcccagtgcattctgtcaaagcagtcacagggccagcttccaggagagaggaaatagacttgacttcccagcaggaggagtgacaaaccatttaaaaccacattttttttttgcagaaggcccaacatgttccacgtgtcaccagccaccactattcacggaaactttcataagtgttcgtcatgaattgcctatagcctctgtgtctcttagttcaaatgctcccaagggacattcatattggttgctgaccatccagtcacctgtggttgacagggccaagtcttgtgctattaaagattttctttgaaggggctgaggtgggattagtgctctgaagattatttgagagaatgctctgtgcctggccgttcctctgaggcttgagataacttttctttccatggtccagagagctctgcctgacacttgccttctaactttttctggagtaattctctccctcatttttcagctttgcttttttgttttaagtttgtctaatatgcgtctttcctttctgctctgtgtccctgagacaagaaggctgtctcctctctcccggtccctatctgtcagctaacttctaacctgctcttcagatctcagctcaaatatcacttcctgaggggagcatggaacaccctggattaagccacatcccctgtccgtctccttttccctcatcttgctatcacactttgtaaccttataccagtgtggctacttgattatgatctgcctcccactgaaggctctagaaggcagaggaatgtgtctgtcttcctcagggctgcagtggccatgcattgctcctgttaggtactgataagtgcttgctatttgcatgatttaaaaattggaagttgagatggtttggtcatttgtcccttccaaatctcaagttgaaatatgatcccgaatgttggagggggggcctggtgggaggtatttgggtcatgggagcagatcgctcatgactgtctcggtgccctccccgtagtaatgagtgagttcttgttctattaattcacgtgagagctggtggtttaaaagagcctggcatctctcttgctccctctcttcccatgtgatatgcctgctcccccttcgccttccaccatgagtaaaagcttcctgagacctcaccagaagctggtgccatgtttatacagcctgcggaaccgtgaactaagtaaaccatctttctttataaattactctgtctcaggttttcctttatagcaatgcaaaatggactaacacagaggtagttgccctgaagaagaaaggaccaaggggagagaatatttatcttgatgaaagaagttaagactagcctcgtttcagggaatataaggacatagtttattggggactgccgctcatccccattggtgataccatgtgaatcagtgaagtcctattgttaagggtagaggctgcatgttagtttgaaatgtagcaagagttcctgcccagagatggtccataagtgcctgattaaaagccaactttttcttttctttatgcttctaccaccatggggccctaaatctgtactcagagatctcagtgatggctgaactttgtgaccattgggccagaactactcattccattcctatttgttctcccatgaagccagtatcttgtttggctgcaagccaaaaagattggttagattacagcttgggatatgacggatgcacctctgagcataatctccatgagataaccctaaccaaaactttttgtccagttcttctgtggcatgctatttatctaaaaagaaagttagtaagttagtaaaagaatcaaaatgccagatgggaaacataaagatggagaaggaaataactgagattttgttttatttaaagattctacactctttgcatgctaggatttttcaatccccacttttagattgagataaagatgggggcaatcttgtttaagttcacttaatttccctgaaataatttaatgctgtaaatatgtactgaacactccatatgtatctccgtggagggtgtaaagacacatacaagttggtatataatcttgaaatttatacctacccaggaattatggcatgcgtatatgacatgaggtcccagtgcaacaatcagataagaagggaataataggaattaaatgggggatggagtagtcaggagtgtttttatagaaaggctagacattgagctgaatctccatggatgagtagatttaggaaaagttgcctagaaagtagagggagagggcattctaggctgtgaaagccccatgtctgaaagttaaagtgtgagaaggagcaggaatgccctttcacacaccaaaggcagtgaaggtatacagggtaggggtgggaggttagggagtggagggctatggcaagccactgagtgagatccttggaggccaggtgcagaggtggaatgcttgcaagcagaggaagtcatatcataaaacctgtgatttggaacattatttcctttgcagttggtgaggtagttttgatgaggaagaggctggagccagagacacctcctgggagatgttgtggtcagcaccacaagggtggtgatagaaattaagagagagggaagtgcacaaaatgggttcagaggaagaatgggtggattttcatgtctggattcatagtgaggaatacaaagaaggaagaaataaagggatcttgaatctgggaaaattatttccatgatcaccagtacaaagattggaaatggatggtcacgccaaggttgtgtggaccagaggaatggaatagcttataagcaatgttaaataactgtgggttggttgaaagataaaggctggaggtgcaaatgagtgcatcattagatgctgttggattaaataaatccaatgaacacaaacttgggagttttactaggcattttaagcagggaagtgaaaaaagaatgtcccatatcttcagatactgacatctaattcaacagtaaattatgttgttctacattcacaacatatcccaaatttaagcagtttgtattgctggtatcactaccttctggtccagtcatcacccttcttcacctggattctgcagtagccttggagcttgtctgttcctgcttgagcccttgcccatctgcagtctgttctcaacacagcagcccaaatgatgctctgaaatagatatcagatcacgttgccctgctcctagtctaaatggtttcccacctcattcagagagtaagccaaagcactcacaagggccccaagggcctggcacgatcccttcctcttaatctctgacttcatctgttactaccttctcctttgttcactccatgttggcttaccttgccaactgcttttccttacacacactgggcatggctgccccagggcctttgcacgttctccctctgcctggaaacttctttacaatatctgcaggacttgttcctcacctccttcaaatctttgccaattggggcctttcttttagtgttgccatccctgtgacttgtacctgtccctttccttactttagtctttttcctccataacctttagtgtcttctaatatctagaccattggctgactcgtttgttgtccatctccctctttaaaattgaagttccatgacagcagagatttctgtctgtatcatgcatggacatcttcaatgcctagaacagtgcaggtacttagtagtaaacatttgttgagtgaatgaaacaaatgctgttagaaacttctttttgagtggaattttgatttccttgagatcagctgtcaataatttctatctttatattcaggcatagtcagtgctcagtaaatgttgaataagcaaatagaacctgaaatataaaatcctaacatttcacattagctagttccagaaagtttcagtactaaatgtaacatttaaaaaacggtggaggggagggatggtggaaggatagttttggtgcatttagcttagcctccactttcgacttcagaattcacattgcagtttggcaattctttcattattactatgattattaattggatgctatttaaaaatttggcttttaaactctcagctgatgttttaggagattatactatacagggtacagaaattgctggggctgactgtaactattcatggccaattaaggaacagcattggcaagaaatgcagggtggatacacttgtgctttgtgggaatcctggtggctatggcttcatagtatcaggggactagcttgctgggcttccttctgcaaaagggatcttaatttggttacctggtggatgcttttataaatgagaagaataaacagtcttgagggacttaactttgttggagagttaaagggagaaagaaaagaacaaagtgaagaaattactctttatttgggagcatttccttgagaagtctttctgaagtttgcttttagttttatttggtatcacttttatcttttcccaggggatgcagatgtgttttgaaataacgcatgcagaaaaaacaagctgtaggaggcagaaataaattcttgaaagtttagtaagtttctgaaggacagaactgcttggagaagctgggctgtaccacatctttaaggttgatgtctgggagaaccaactactgtgtttcctggtatgaccattgatgtgtttgttgatagatacaactaatggctaggttcttgcttgtacttttatgtgggactttttaaaagagttcaaacaatagggaaatatgacacaaaggaacctgaaaaacataagcagcagattacacctttgcttaactttaaggttaaaacaatccatagaaaattgttttggatttttctagctagtgaaaatactatacagccctttgcagatatagtatctaaggggtttaaagaaagttaaaggctggtgtggtggctcaggagtccaaggctggaggattgcttaagcccaggagttcaagaccagcttgagcaacaaaatgagacctaatctctacaaaagaaaaaaagaaaagaagaagaagaaagaaggaggaggaggagggggaaggagggggaggaggggaaggaggggaagaaggggaagaaggggaaggaggggaaggaggggaaggaggggaaggaggggaaggaggggaatgagggggaggaggggtaggaggagaaggagaaggaagttcaaataaaattaagtcccagagaacaaggccatacacatacgcagccaaaagatcattcatgtaacattgcctaagacttctccatggtgtcagttaggaggatgtttaaaatcagtggcagagctattttcctagctctgcctaaaagtgccggaggtatattgtgttttcagtctgggatccaaagccatgtgagaagaaacatcagagatgaaggcttttttggttttaaaccatcttagctgtgtttgcactcatttctgtcctcattaaagaggacaactggggtaactgagatagtgaaatgtatccaaggtgaaagtgagtgaaaacaaaaatatttctccagtatgtttttgtgatgagaagcaggaaatctgaaccactgagctcttaagaaagtccttcactgcacctttgtttcctgtgtcaaagaggccacattcattacatagcacaattcttggagtgaatccttcactctcaacaaatgagttaaaatgtttttctctaaaaaataaaagatgcatcttcagcaaattttatttttattaggaaaagccactactgcatcctacttttattctgggtgtgttttatatttttgacaagtgctctcacatcaaaaaaatgtgtctacattaattcaaaattcataatgatcactcttatcctgctgatacaattatcaaagttcttttttttttttggtcttctttcccctgctgttgcctagtgtttgtaattatcttttcttgaggttgggcaggggagaggatagggagagaatgttcagcaaaaatcagtcatatatttagtgtggcttcccattcgttcatttcatcttccatctatccatttatctttccattcacgcacccaaccatgcaatattcattgatcatctgtgagccacctaaattggaatagcaaggatctctcctatcaaagagtctagaataaatgccaggcatttacagtgggaaaatgttaatatcaggtaaattctgtcttggggagaggtcttgtgacctgtttttgggggttttagggaaagcttccaggaagcagtactgtctcaactgatacataaagggcaaattgaagttagctggaagaactgcatgtttgggctagagtgtggttaagcaatgaggaagaatttccagcagaagaaactccatgttctagaggtcatattttatgtgagggttgtatttctaaagttcttgcaaatttggaactcccatgattcaaaataattctgtcaaaagatggtggatattttcatttaccagctaacatggccctgtggccactctgtaaacagagtttagagtttcctctgccccagccagcatcaaaactacaattcttgaagaattgtttcggtgggggtgcctacatagatccaaattaatgtgagacaatattagtgcttttgtatcaccttatttcaaagctgcatgattcaggttcacctcaaatatgaccaaactctggagtttcagagcagtagctcatggcccatttgatggtattaaaagtagatcaggatggatagcatgtacacacaagactaggggtgagggagaaaggagataaaatggataaggaatcagggaccaggtcagtgaaggcttgtaaactgtgttaaaaggtaaaatagtcacattaacattttaaagaatttattcgtgtagatagtaattcatgaattgggcagcatcaggtagtaagtggttcagggctccgctgaaagggcacaaggggaacatttttataaggtgttctaggaagcaagacaaaagtatttggttaaagtggaaagtccctagttagaggttaattggtagtttctgactctttacatggtattttgactcacattgattaggttttggtttacttacttaggaacccaaggtgccggagccatctcagcctgatggcttctcagttagtttttaaaagcaattataataagaggatggcaatggggagcctctgaagaatgctgaggaaggaattggcgaggtcagcattatgcttttgtttaagtgtaaatagaagagagctgaaattagaccatatgtggatttcagatatttttggaacatttatcttttatttcttattaaactttgcttataaacaatgtaagcttttgtgatatcaaagtcctcctcttaaggtgttttgttaatttgcttttgaagagtccactaatcatcttgtgagagaaaataaaagacgtggcctgattggcaaaaagattggatagaggttcaacccagaattggggtctaaggctaggggagaatccgattagggaatcatacttggaggtctatggtaaaataggttgtgggaaatatgggttagacaaagttaaatagacttctttattgtggggcttctagatccttaaagacattaatgtatgttaaggtgcataggatgtcatcaacttgtttcacaactaaggaacctttgttccaaaagtagtcattacagtctggctaaggactagtattccaaggaatatgtatccgtttccttttgccacaataatgctgcataataagcaaccacaaaactgcagtggaatagaataacatatatgtatttagcctgtaagtttcggggggttcagctgctcaatgcttgactgatttcagctgatctcattcatgtgtctgtgctcagctatgggttgggcaggcagcgctgggttagttcatatgtctaggggctcagctagctgttagctgacctagggtggcatagctaacatctatgctagatcagggtgactcatccctgctaaatatgtgtctcatcctaagatactagacctagcatatactcctggctatggcagaggagcaagaatgagaacaaactcagttgtgcaagcacttttcaagcctttctttgcatcatgtgtgctaatatttccattggccaaaggaagtcacacagccaattctagagtgagaatggcaccacaaagttacgtagccgagactgtggttacagggagggagaattgtgctctttttgcagtcagactatcctagatcccaacttagaaattgcaggatgagattacagtcaattgagcaaggaatgaggtcagacttttctccatgccatggccacaggactgtacttttgatactgataagcagcctcacaaatagatgtctgagccatgtcaaggaagagagagttcatctgggtctgcacaggtctttattgtttttctatggaattatttcattgaaggctgaaaggattgtggacatcatctagttctagttgcatcgtgttggcagtcgtgaaggagacagtcccagagaggttaattgggctccttcaatccaaacagctatctagaagcaaatctgggccttgaacccagattctcaagccaattgagttttaattacctcaaagaagctttgttgtggggtggaagggactgaaatgtatttgcaatctttatataggaacaaatcacattcctcctggaggaaatgaaatataaatgatttttgaaataggaagaatagagagtagtcatgccttgttagatgtctcacaaagggcaaagggtaaggatagttaagcattgagtgattactgaaatactgtggctggagatccttggtaatagagtttcgttttcagatttttttttctcctgtctcttccctcgccccaagaatttctcctgcatcagggaagtcaacagaggacttctgagcggagagtaagaatttgtgttctagctccttctttatcaaacagaagatacaattgtgaaggcagacccagccttctagaatagctggcacattaacacctaacttacctgacattggtagggaacaatctgtgctacataagtaaaattttgataatgaaatcctaaccatttagcactgtcaaagtagctgttttcgtgatggaaatatttctggtccaacagatgtgtttccctgatttaataaacagaataattgaaacttccagcctcatccttttagacatcagttattgaactgtgcagtaatatagaaacatgccttgtaaagagccatgtaagtgtaaggtgttgttattgtttgcttgggtttctggagtatgtgggccacttggctttagacagatctgctttctaaattcttgtattccttgtttgttttcagagggttcccttgccctctggcctccaggtaggtgtagccaacaggaagcactggtggaaaactggagggccagaagagagagaggtcagggtgcctttctctgcctctctgctttctttggtatctctaggaacacatgtgtctcttccatgtgtctcttccaatcagctctcaccagactccccttttctccacagcagcctgatctccacggctgttgccctggtctctgtcagttggctctagcctctaggctctgataacgtcacatccttccattatcccacctgttagggaagatagcagctctcctcagttgctagtctctgggctgcttcactgtccctctgtggtctgtcagtcattctcacatctgtaacaagtcacctgatttgaaagacctagagtagtttctgtgttctggttgactttgactaataacgatttattgaatttgccttctcttgcaacccttacttccctcctgatttgcttcttgcaacgtactgtgcaggtgacatccacgttatgcagtttatttcattggacataacaatggaaactcttttaagcaatagagcacagtggttttgagcctgcgctctggtgttagaatgtttgcatcgtagtcctggctatgctactcattggctatgtgactctgggcaagtttcttaacctgagactgactttttaatctaaaaaaatgaaagtaatttcagtacctaagttgtctcaatatgagtttcctgggaaacaaactcccaactggaggttggtgtgcagaggtttgtttattctcaaatactcttcagattaacatctgtggaggggaaaggacggattcaggactgggcagagggagaagttgaactgcagtgcaatcttaacaagagccttagttaaccctctgaagcaggttgggcgcttattcactgatgttgaccattggaggcagttgaccgtgaatggaacagcttcctccagctgagggaattttccagagaggactgacagttgagggcattctgcctgcatcactcatagtagcaaggaatcaattcttcagtcctgaagcagtgtctgggcgtcacatcacagtgtccatgacctatatccaggtgtgtaatgtgaaagataaatacagtgattaaaccataagaaatgccttgctaggtgcgtaccacttggtgaatgctcaacactattagttaacattattgatgaattaaatacagaagtttcagttagtggactttatgatgtctagtgtagctattctgagagttttgactgatttcttctccataacccagtcctaaagagttgaggaaaagcagagtaagtggtctgggataaatagggttccatgatttgtatacatatactgtcatgcacatttgtactttcctatgacttttaatgtggtgtctttaaatatggcttacccataggttcttgtatctttattccttaaggtattcaaggtatttagcatcaaatttggtacaaatcaatgcagcttccattttttgaatacttactatgtagccatggtgctaaacatgcatcgtctcgtcagttctcaggatgactctaaggtgctgagattcctagtttagaaggaggcctgaggtcagtgaagttaagtgacctgccccaggtcacccagccaagaagtggcagagaagttctcctgccagggctgccagattcactgcgagcctaggcttttcactacacatttggacgatttaagcagcagtaggggaaaccttctcctccgaaaataactctagcaaagtgtaggtgttgttttggtagaaacatttcagctgttgccataaaaatcttcccccaaatggctttgtgagagcaaagctgtgcaggctctgcttgtgtttatgatgggagccttatggctcagccacaacacaaatgatttgtttttctggccttgttggcaaagtgatttaatttctgggtttccctgaggaaacaatctaaacaaatacagtaggccctccatatctgccagttctgcatccatggattcaactaagctcggatagaaaatattcaaaaaatttaacaatacaacaataaaaatagtataaataaaaacagcataacaaatatttatgtagcatttacattgtattgggtattataagtactccagtgatggtttcaagtatatgggagaacgtgcataggttatatacaaatattatgccattttatataagggacttgagcatctgtgagttttggtacctgtgggggatcctggaaccattcccttacagatactgagggatggctgatatggtttggctatgtccccatccaaatctcaactaaattttatcacccagaattcccacatgtggtgggagggacccagggggaggtaattaaatcatgggggttggtctttgctgtgttattctcatggtagtgaataagtctcatgaaatctgatgggtttatcaggggtttccacttttgcttcttcctcattttctcttgctgctgccatgttagaagtgcctttcagcctcccgccatgattctgaggcctccccagccatgtggaactgtaagtccaattaaacctttttttcttcccggtcttggatatgtctttatcagcagtgtgaaaacaaactaatacagtaaattggtaccagtagagtggggcgttgctgaaaagatacccgaaaatatggaagtgactttggaactgggtaacaggcagagattggaacagtttgaagggctcagaagaagataggaaaatgtgggaaagtttggaacttcctagagacttgttgaatggctttgcccaaaatgctgatagtgatatagacaataaaatccaggctgaggtgatctcagttggagatgaggaacttgttgggaactggagcaaaggtgactcttattatgttttggcaaagagaatggcagcattttgcccctgccttagagatctgtggaactttaaacttgagagagataatatacggtatctggtggaagaaatttccaagcagctcagcattcaagaggtgacttggatgctgttaaaggctttcagttttataagggaagcagagcataaaagtttggaaaatttgcaaactgactgtgacagaaaagaaaaacccattttctggggagaaattcaagctggctacagaaatttgcataagtagcaaggagcctaatgttaatccccaagaccatggagaaaatgtctccaggccatatcagagaccttcacagcagcccttcccatcacagacccagaggtctaggaggaaaaaatgatttcatgggccgggcccagtgtccctgtgtggtgtacagcctagggacatagtgccttgtgtccaagctgctccagccatggctgaaaggggctaacatagagcttgggctgtggcttcaaagtgtagaagccctaagccttggcagcttccatgttgtgttgagcctgtgggtgcacagaagtcaagcactgaggtttgggaaacttcacctagatttcagaagatgtacggaaatgcctgtatgcccaggcaaaagtttgctgcaggggcggggaacttcatggagaacttctgctagggcatcgtggaagggaatggggtcagagtcctcacacagataccctactggggcactgcctagtggagttgtgggaagaaggccactatcctccagaccccaaaatggtagacctactgacagcttgcaccatgtgcctggaaaagctgcaaacaaacactcaatgccagcccatgaaagcatctgggagggaggctgtaccctgcaaagccgtaggggtggagctgcccaagaccatgggaacatatctcttgtatcaatgtgacctgggtgtgagacctggagtcaaaggagatcattttggagctttaacatttgacagctctgctggatttcagacttgtatcggccctgtaaccccttcgttttggccaatgcctcctatttggaacagctgtatttacccaatacttgtaccctcactatctaggaagtaactagcttgcttttgattttacaggctcataggcagaagtgacttgccttatctcagatgagactttgaactgtggactttgggttgatgctgaaatgagttaagactttggggggctgttgggaaggcatgattgggtttgaaatgtaaggacatgtgatttggaggggccaagggtggaatgattttgtttgcctgtgtccccatccaaaactcaacttgaattgtgtctcccagaattcccatgtcttgtgggagtgtcccagggggaggtaattaaatcatgggggttggtctttgccgtgttattctcttgatagtgaatacatcttgagatctgatgggtttatcaggggttcccactcttgcttcttcctcattttctcttgctgctgccatgtaagaagtgcctttcaacctcccgccatgattctgaggcctccctaaccatgtggaactgtaagtccaattaaacctttttttcttcccggtctcggatatgtctttatcatcagcatgaaaacaaactaatacaatggctttaaatttatttgtaattggatgtttaaagaggagccacaagggaaagtcaaagtgggtggcccaggtacgttttcattcagtgagtgatacgataaggggaggaataaggtgcataggtgaattcactcagtgttctttcttcctagtatttggctctccattcttcatcaggaaatgattattataatcaaccaaaattttgcaaacaaggtgggcatttaggtatgtaggtgttcagcattatttttggagaacagagcaaatccggtcattatttctttttattgaaataaaagtaatgactccttttctgtaggaaaaagtaatttttcaaaataggctacatggtactgatgagaagttaggaagctgcatgatattccagtcagatcaggatcccagactcccatctttctggtccactatcttgatctttccattttccattggtcacttgggcaaagttcggtttaggccatcaggtccacagtgcacatgtgcagcgaggagggattagagagaagaaaggaatccttttagttgaggcatctcctgccatttttgtcatcttactcttaagttccatataacactttaaaaaaatttttcttgaccaatatttggtcacatggtcacatctcagtgcaggagagcctgggaaatgtagtcttgttttgggcaactgcctgaataaaattggggctctcttactgatgatggagaggagaatgactattgagttataactggcaatttctgctacatttgggattggaatactaatgccacaaccaaaagttttgaaatgatggagttaacattaaaaggtgaattttgttggtgtgtgtttctctaataatgctcagtcgtctgtggctggtgtgcataatgaacatacacagctcctaaatctgcttcactctggccccctttcctgggggaaacagtgtttggagaagcacactttatgtcattcaacagatattgatcagctaccatataccatgcactgtaccagatcttagcagagtctaggagctacaacattttccacatttatttgaccacctctcccacaaccctctccctccctccctcctttcctttccctccctcctttcctttccctccctcctttcctttccctctttcctttcctttcttttcctttcctttcctttccctcccttctttccttcctttttccctccctctctccctcccttccttccttctttccttccctccttccctccttccctccttccttccttccttccttccttccttccttccttccttccttccttccttccttccttctgcttttggggtacaagtggtttttggttacatggatgaattatgtagtggtgaattctgagattttagtgcacctatcacacaagcagtgtacattgtacttaataggtagttttttgcccctggcccccctcccacccttccccttctgagtctgtaaagtccattatatcactctctatgcctttgcttacttatagcttagctccctcttataagtgagaacatgtggtttttgattttccactcctgtgttacttgatttagaataatgtctccagcgccatccaagttgctgcaaaagacattattttgttccttttaatggctgaatagtattccatggtgtatatgtaccacattttctttatccattcattagttgatgggcacttaggttggttccacatctttgcaattgtgaattgtgaagactcaattctttgttgaaaagagctgcaaagtcactttacaaagggtgtggaaagctgaagaacttgagattcagggcctttttagctgtcaatctactgcagtgtcccagggaggaaaagcttaatttgtatggatgcttgattctttctgtaccttttctttctctgtttccacaaactcacccagttaaaatttctgttcattgaacacgatggcagctaggttgatgggattaaatcagttgtctttacctgcctcagtgtgttgggatcctcaaagctcagtgaaaccaccagctggtgaataagacttctgagtgggtgggtttcctgatctcacttgatgttttttgggacaatagtgatgccccatttcctttgtgctctgtagctaaactcccagggagtaagacatgtggcataaacataacctcatagactatacctacatcgtgcccactttagctctttctcacttttttttgtgtgtgcctccagaacacacaagacaagtaaatacagtatggacaataagttacgagtgaggagagagtgttttgagacagccaatagcaaacatcgtggagaacttctctttataggtcaatatccgttgtcttagtctgttaaattcttccagtcatagactgtgcaatgtatgcataagctatcaacacttaaaaaattatgatggtcactaagaagaccttttttctgtacactttcagtgcttcttcagtcatctgccatgggtacttctgttcttcatctccagattgtttctggaagtcctgtgggcagctctttaacactggaaacatgcagtctcctcatccataaaatgggcaatacctctctcaatgtattcgagaagtcacgtacaggtcacatatgaccattactcataatatgtaacactgacatggcactaactatgtgctaggtacagttctcaacaggcttatgaggtaagtgttattacagtcccattctgagatgatggaattgaggcacagaaaggttaagtaacatgccagtgttgcacagacctgaggtttgcacccaggtagcctagcactgcagacctgtttcatattcatgctgaaggactaactgcctctgtaggtgtgagtactgtacatggaaaagttagagaagtaaaggtctaattttgacagaattgagaggggagggggcattgacttaggttttagaaattaacttagactcttagtacataggttgctgtggcaatttacatagctatttctttcaggtacatttgacattcaaaagcaatcagatcgtattatctgttctttgagggattactgggctctgtgaatcttgaaggttacatttgcaatcagcattaattttattgttaaccattttccttcatgttggttacagggttgcctccctccctccctccctccctccctccctcccttccttccttccttccttccttccttctttccctctttgggctttagtggagcttataactagttgaactagatggatcaactcaagttgattattcaggaggccttattatcccccagagagcagacacggagcttggctggacctcacggatcactagtccatgtcactgcacaatgttcttcctctgttcttcgctattttagtccaaaatgcctgctaaatggagtggagtgaagaaggcacacaatgttaatatgaagtaacttccccagtgcattttctgattcatcaagatgctcacattaagctacatgaacaaatggaggaattcccctggaagccaaggacagagaaaaatcatatgaaaaaaaaaaaaagataaataagagataccaacttgccttttatattcaagcagattttcaaaaagtctcattgcatggaaagtggctataatttaaacaaaaagtcatttactgtgctaacattcatgaagatagcaattcttgggatgctgcatgaattgggcagaatgttaaaatgctgaaggaaccttgtgtctggtttaaatacattttggttggtgtcatataggtaaggaatggcagcctcatttttaactcttagtaattaaaaattggaacctttaagtagggagagaaggaaactatagtgtggaattcaagatagtgcacttgattttctcattcctggggagtcacatgggtttatgagactcctcaattgtttgacatttcatttaaaaaataaaacaacaaaatgagctttccctttcatctatacaagagtccatgaagaagcctccttctcttatgttgtaattcacagaccaaagagttgagtttgagtatataattactcatctagatatatttacaaaatactagtaattttactggtagtagctcatttatgctgggtgtgatggtgcgtggtcctagctatttgggagactgtggctaaggagcctcctgagcccaagagtttgaggctgcagtgagctgtgatcatgccatttcactctagcctgggcaacagagtgagaccctatctcaaacaagcaaaactaatttatgttgaattcttcctatatgtcagctagcctttcggccctttacctgttccaccatttatcttcacgataaccctttgaagtaggtactatccttgtctccattttacagatgagggaaccaaggcacaaggattctaagtaatttgcccaaagtcacacggcaaggaagtttcaaagctaggattcaaacccaggctattataatcactacactacaagtattttcaaacagtgtttcccaatatcagtcatacagataccatctgcatgctttttgccatagttgtattttacttctattattatttaatgtttctcactttttttttttgagacagagtcttgctctgttgcccaagctgtagtgtggtgacatgatctcagctcactgtagcctccaccttccgggttcaagtgatcctcctccatcagcctcccaagtagctgagactatgggcaagtgtctccacacctggctaattttttttttttttttaatagatttgggattttaccatgctggccaggcctgtctcaaactcctgacctcatgtaatccaccctccttggcctcccaaagtgctgggattacaggcgtgagccactgcacctggccactctcacgtttttttttttttttaaccgtacaaaacagtatttaaaagagaaaccttacacctctatcttaaatggaaaactattatgtgtgcaaatagtagatacccaataaaaactaaacagtgaaaaccatttagtgttattcaatcctaagtagatgccactggctgccaaaaaccctgcgtcagaggacgtcctttctttattgagacagagagattttaaaggcatgctctatagggttgagactatttgatgcaatcagttcagagtcagggattaaatttttctactaggagagtctgtcttattccatactgaatttgtaaatcatctaaaatcaccttgtagtttattagtgttaatggctcctacactctgagaatcacttgtctaaaatacaaagatgttgtactgtttttagaattatcttagggaaagtgaagcagaaagatgtttaaatgaattcaggcctgtattattaagccaatccaagtaaagctattatctgaatgattagccctaaagtcccttaccactttatctggtctctagaaggccagtttaggttgctttgtgggaagatgtatgggtgatttttatccaagttattatctaagaaggtgtggttactcctgaattttaaatcagactacttagaaaatggccttaaattgatcctttttttatccttgacagatacttattggttgaaacatcagagagctttaagctttctcaagtacatgttggagaccattgggactagtgtccctttgttaccaagaggacagtgtatgatatgcatgattaacataggattattatatattgattatagtgcaaaaagtaaaaggtgtcttttcatctttgagtttaaaataaagagatttagcatgtttttgtgtgataagagggatcttcttaattcccaagacctctttaaaagcaattcatgaacatacttaagactcatcagttgaacaataagttaatctgcatctgaaggttttgctgattatctgatcatataatttccctgtattctgattatgtttttctgatgccttttacagtatatgaattcttaatcaagatgattccgttagcagtagctcctctatacacagtgagcccaggagggcagagagcttggcttgatgaaagtttttacagacataaagatggtgaatgaaactggcttcatcttgctcagtatctattttgaaatattatatttaaatattaaacactaatattaaatattatggttccaaagtcatagcaagatattaactgtggcttgcatggatggtgaaattattacaatggtcttttaccgttcagtgtgctcgtgaacttcagaaggcttctgatagattttaggcctgtttagttgcccatagttagggagaagaggtggccatactacaggaagacaagctgaacgtccctccacactaaagctgccacaggacctgtgtcgccaaggagctgctgctcagttctagccaggacagcagggtgagctggatccaactccgtttggtggcataatagagagcacctttatgtgcaggtttcatctgttgagtagagaattgtggctgggagtgtggggggtgggtctctaacatttgctgtggcttatttagatgtagcccttaattgtcctgccctgccctgggctaggttttggaaaccagagctcgttagaagtgtgtcctggcttggggaaaagatgaaagaagtccaggatagttaggtcctcaaggaagtggaccatgtctgtttattcatccgtatatacctggcacctgacacagcgccgggagcatggtgggcactcagtagatacgtgttgagtaaatgaacgcacagagttaaattgggcagctgatgtttttggtattttataatttttgcttggtgacaggaaaccacaacaaaatatgtgcctgtgtgtgtgcatgcatgttttatagcttcctgaagaaatagaatcaatttcagtttttgcaactaaaaaagaatgcagaaagtgagcttggagtgaggagctgctttcttataatgacaaagaatagttacaagctgttttctagaccgaggtaatggtggaggtaacttctgctcctttgttctgtgtatctttgtgagaagggagagcctgcaagggcatagaaaagggagaagccttgtggaaaacagagaggtttcttctggacttcgggtttggaggattagcagaacatactagaaaataaggttctttctcttgggaaattactcatgctggcagcctgaaatagcatgaaaaggacttttattagtggcaggtcttcagatagtttgctagagaggagaagtgcttccaagttgagtgaaagcagaaagcgagccagagttgcattagcaagtgattcaaacaatgaaatctcaagcagcaaggcagctgacatctcagcacttactctgtgctgacagataaatataaattatttttgagacagtggttatttgagatatgtaaaagtttttagatagatatcattatcccaattttacaaatcaggaaacaagtttataaggtttgtaattagtccaatgccccataaacagctggtacataatggggctagggtttgaacgcagcttatttgatttgaaaacctaggttctttccacatgttaagtaatcccttgcctttttgagaactgcattttatagttagcatttatcctaagtggttcatggtttttactaattttaaagggaaagttctagttttatagggaagataacgttggcttgtgaactcagtgagaagatggacagtagagaggttaacttgtccaaaatcaaatcgctctgatgccaacccaggtttgttggagtgcaatccgctgctcttacctaccatgttgtgctgtctggctgattttaccacccaggagctgttgattaccagtgtttggttaatcataggaaagtctggcttgcagccattgccagtgcacaaatcatgttctgtgaaataaattttattttattgactcgaagagacaaaagtgaagctatgtcttctgaataatacccagcattgcttgtattggactttgtatattttttttcttggagtagaataaagtatgtagacaaaataacttatgaagcatttttattgttctgtggattctgttctaacttgaaaggtaactgctttttcactttttagattctacaaaaaagagtgtttgttacctggtgaatcaaaacagaggttccattctgtgatacgaaaagataattattaataaactaaaattaaataacactaatactattggcagaatacattaatgccgataatcactgatactataatagatgttcaatgcagccagcatgaagagctggaggaacattgatgagaattttaattcatatgatatttaagtttatatcctttatttctttagcatgttctgttttttttgtcaaatcttttagtttcacgattcattagagtggatgacccaggcagatggaattggcagtgtttattagaatgtcataccctgctttaaaataatgttctctgctaatttgtcccttgttccctgaaacaatgagttgactttaccctgagcatcctgggttgtcagctttaaagtcaatcttttgcaaggttgaaaggatcaagggcattattacataattgttttgtctttaatccatagacttttggaggaaaaggaagcaaaatgtggcgatttgtgtatgttttgggtattgggcaagaggaaagagagaagcagaggtatacctgtacctaaaaagttttcttaactgtcacgtcatggtgaattaatatgttggtgctttcttaaactcctcagtaatgagagtcaaaaaacagattcaatatgctattcggagttaatatgggaaaagatgctgtatatttatattaaagggaattggaaaggatggtatttgctctggaaacacagccttcgttcatgtttactagtcctatagtagttacgttcatcaattatgttttgtttcctagaatgtacaacatcctccatgtttttttctttctataatttacatttatattgtgtttttccttttttgtggtaataaactattgtaaatgtgaataataaatatattataccagtgcctcttgtggaggtgcaatattagctcatttaaaaaaaagcctaaaagccttatcttgttctcagtaaaaatgtttatagtcttactttacatattgttctgaaaagctgttttttaaaatgtacagacctttccgggggtatgctggtatacatttaaccactggtggggtggaggtgatttgtatttttaccaatttctggggtttaaatattcttaccatggccaattttaagctagcagttcagcatcactgaacctggggatgggaatagatgcacacagttgtcttttgcaggccttggaagctggctcagccactgattttagtaccaagagattggaaggggagcagtggctagaaggggtagtggagaggcagaaaactaaagaatgtagaaaataataagaaactaactaaattgggagatgggtttctgttaaaggaacttgagtaaacatgtcgactctgttttctgaaactgccgggatgaaaaaaataactaaaagtggggggaaatttttcactaaaagtagagaatggctaaaccccaaatgttaagcctctgaagaatatctgccaaatttggagcaaatctgagcagagtcaaaatatgtgtctcttagagccccagcaggtggattttttgcaaggtcatggccaaaatccctaattgggaacagagaggttgaagccctaggcgggttcctggagaagcagaacttgttcctcttttgatgttttgtttcgtagattatacagtatcctccatgttttttttttcctttctataatttatgtttatattctgttttttcttttttgtggtaataaatttttgtaaatgggaataataaaatattatgcttatagatttattcactttagacagtatctgttgagtcctaaatatgaaaaatttaaaacgtgaacattcatattttcttccatttttccaatctcttgatcatgctatttattattttttacatgatcatgatttatcacatttttattacattctatataccgtaatttgcctccatttcatatttaaataaattacattgcaaacatcagaacaaaagaaaatatcaaaccaggaagcataataaattgaaataatagaattaagatgaaccacctgcttattagaaatcataatgtaaacgagataagttcatttattgaaaggaaactattttgcgtgagtcatccaaaaaagtgattataggcaaacttaaaagtaagcagtggttataattaatacaaaagatgaagggtatttttacttttaactttattccttctgtggtctgaactttttcaataaacttgttttactttaccaattaatttttaaaacatcccagactgtagccattgattataatgagacacagctgcatcgttttcatattaaacagtgactgtttcactgcctgttttttgtcacatggcaggccttcagtaaatggtggctgaaagaacattttctcaagatgttatagtgttattatgatgtgtatctaatagttgccccaatctttggagtcttttttttttatttgcatgcacccttgtgagggaagtgattttattgctgttttacagatgaagaaactggggctcagggaaattaagtgacttgcccaacatcaaaccatctcatgtcttctgaatcattttttaagtaaaatatttttctcatcatatgacagtctcttaaatacaatattttagttatgattctgttgactgattagaatctatataaactgaagacattttaaaattatattaaatattttcttattagaagcattagaagagtataactcagtttagaaagatttcaatctttcaggggcatgattgggaaaaataacttgtgtgaagtagtttgttctttagtagtcaagtggatgaatatatgcagtgttgacttaattatctttgtggagtagctgtgaaccaccagtctattctgtggttctatcctgaaaactgtcttttcaatataaataagagcaatagactgtcaggagatttctggggaggtggagggaactgcaggatgctaggacttgagactgatggaaacgtttgaggtagagtcaggttttacacgtggtttgctggaggtgccatgactcagtttcttcctcttgagtctgcctgtgtaaaagtggttgaaatgtgcacatatgcatgcaaacactattgcatttgggtggtgttttttatggttacttctagcctgcatcagcattttggcttgggtgcccactctgtatgatatattggctgaatgttcatctctgaggtctgacagtcggcttttgagagcaaatggatggccacagtacaggcacgtgcccgctatagcaactgccaaggttcaaaacaaaaagtccagcttctcgagggcacaaaacatgctgtttcttatatgttctagtgtaatgcaaagcatatactaaatatccactaaatacctgtagggtgtgcttccattcgctatactttcatttgggaaagctttataatagtgtgaaatctagtactgatcacactgtaatttttagagatagtagtacaagttgggacagatggggagcctaataatttaatgattttaccaagtgcgttgaaaacttgtcacaatatcagcttggtggattaaaaattggcaaatgaaatctggagtttttggcattttccaaatctttctcacaaaatacaattctctctggatgcctctcaaatacagggtcccatgattaactaaatgtgggaggcacagcataaaatctcttctaacagatttataatgaaaataagcatactaaaaacttggagaaatcctgcagaatagaattctacttacattagtgtggattggccatcctaaaacatcctggaaccttgttttgcagaacattttacattctctgagcattttgggaaatgccaaattttttattgtaacgctgtcaccgatggatgggtaaacctggggctgtttgtgtgtgtgtgtgtgtgtgtgtgtgtgtgtgtgtgtgtgttaccatgttaatttgatgtagaattaaaatcctcttgagttataccaacaggacaaaagtctcaacattttactatctgtgcaaggcagataatctctagatctcattttagacagtagttcttaattatttttctttatatcagtgctacttgtaacttaaaaatttttaaagttttatttcctttcttgaactctgaaggtattataaaggagaaaaacagtaaaagatgccagcccaactggggaggttggaacagagattatgaatatattataaccaagttactacatttcctgaattgtgggcaatcagttgtgcctttctttcagtttatatcctgaattttttgtagacttcagtatagaaaaaacaaagatttgttttaaggaagagttcaggtgtggccttccaattttactcttcctattataaacaaacacccaacctctgatcaggtggctcttcttgttatgtttggggcctcttactcattcccgggcagtgttcctcggcaatatgcctgtgacaagcgtttgctgtatttgttgttcgacttagggtagttgaaagagtctctctcagccactctctctggatattttgttgtggctgtgggcactgtttgcccagcctctcactttgtagcggaggggtgggactctgcgtgaaaggaccagcgttatagtccctggcttctccggctaattcatcccgaggctcctgccccttcccattctggaaggggcgagcttatcctagacctgtgactgcctctgaagttctccacctgcctcaggcgtgctctccagtgcctgtttctgactgagtgaggttgaaatcctactgactccttttcaggtaaaaaagcatactgaaaaatggctttaggaatagcagttaagatttatatagagggggcagttttgttaagtttatggtttctgttgtttgtagagggctatcacggttttattttcatggtccctgaaggtaagcagatatagctgtatttagtgatagaaaatactatattgcttagagaacccaaacttcccatgaaaattgttatatttattattacttttttctttagactttcttataagagagaaattgaagacaaaattgtgccaacaaagtatattagacactgtgattttgtggtaattttggcatcaattagatatttattttaatatctctttttataaaattttcctaaacctaactgtaactcgaatagagttttccataagacatgtataggtatgatttgcttggctggtaggatttcttggtgtgttttatttatcacactccatattttaaaaattaactgtgtgtggggacaggggatatatgggaaatctatgtaccttctgctcagttttgctatgaacataaaactgctctaagaaatgaggtctattaaaaaaaaacagtcccttgataatactttctgtgaatacttaaatataatgtgataaagcacagatgatgttaaactttttttataaggcataaattttaaaaagctaattcatttttctttttcataattagtaatgaaaatatgggacatatttcagtattttgttttgattgccactttttttgttcaaccatattcagatgggtaaaatgattattttcaagtctcttttcctaaataagaagtgagaataaaaatatactttgaacatgaacgcgtacttattcattgtcttggaaagttaatgagccattatgtaaaattcctttctgaaatcagagagtaaaaattaacaacttagaaagttggtttgtgtatttggtaattatgtttctaaaacccattttttcatataatatgcacatgttcatggacagaggagtgatgctgaagtatgaaacttgtacttagtaccgaataattggctttgaatagctttagaaacatatttcatatttgcgtactttattttttcagttaggcacgccttaaacacatgtagttatgaaacaaacggtgaaaccatgactagccacagatatttgagcataaacaatcttaattataatgactgaagtaaacaaagcatgaccattaaaataaacttattttcgacagatttatacatgaataatatgcaacattctatggcaatttttaagggtgcatgaagaactttcacagctgtcttttatagctgaagcagggacagtggcctaagaattcctttgatagttattacctgttggaaaaaaaccactttatgtgctttttacattaaagagcaattacatataaagtgatgcactctccaaagatacagagaatatttccagacacattaaagcatatgaaactttccaaattttcaacacaagttcaactgtgttttatctttatagactctcccggggctttggggtaagttatcttatacagatggaggctagaactgaagcattatagagcaggagaaggtgcttccaggagacaaggtgtgcaaggcttaatgttgcttacctgtttacctgcacctgtttacctgcacctgtcttctctgaaggtgacgctgttgatgaagctgctgttgagaagacccaagtaattgagactcggtctgtgggcttgttatcggatcactccactgttttccacactttaatgtgcgtgtgaatcatttgtgattttgttaactgcatattgtaccacagcaggtgtggggtgatgaggcctgagattctgcattgctaacaggctcccaggtgctgctaatgccaccatttcagggaccacactttgactagcgaggagctacaccaccagataccaaataactgctcaggtcattgtttttcacttaatggacattgtctgtccatagtgggcagtcagtttgcgaagctcatgactgagatgtgattgaggggaatcgactagctggtgacactggccgctttgtggctgatataactgatgatgtgtggcttgttttctctggtagaaatgtgtgggattgtcacctctgctgaacttccacagcagtcttttccaggactcgtcatccttggcagccccaactcctgcctgtcagcccaagcagccaccaattaagaaagcgttcaagctcaacacccacctttcaagctcaagtctccctttgcggttgctacaaccaccaagggctcatcctcttctcctgtctgccctcatgtcctgccaatcaggagccttttaaatgcattgagtttgatttgcatcttgaacctgagtcttctgtggcatcctctgcccaatctggcttgcaggtgctccactttagctccctgtgaatttaaatatagaaactttatttgtgaggagctgcttccttcctctcacttaacacacaattttccaatgtaataatccagttttgggcatttgattttcataaaaactttccatgtctcagcttgtgagatatgtgtcttgagttctcaatgtaaacactttgccagtctgtaattccagcactctgggaggccgaagcaggaagattacttgaggtcaggagtttgagaccagccaggccaacatggtgaaaccccatctcttaaaaaaaaaaaaaaaaattagcccggcgtggtggtgcacacctgtaatcccaactactctggaggctgaggcaggagaatcgcttgaaacgggaggcagaggttgcagtaagctgagaccgtgccactgcgctccagcctgggtgacggagcaagactgtctaataaataaataaataaataaataaataaataaataaatactctgccagggttctagataccatgtgaattgaactcctgaagggaaggaagtgggcagtggggtgttggtgtgatactccaaattcttcagtgattccttcccattgtactttcctccacaacattgtttgtgaaaatttcaaacatatagtaatttgaaagaattttacaatgaacagctgtgtattcacctcctagattctaccatgaacactttattgcctttattatctgtccatccacttatccctctgtctttcactgtcttatttttgatggatttaaaaataaactgcaggcatagtttgtatattccagcatgcttattattaactggagttcaatatttcttatcagttattcatacgaaatttctattcgatgaaatgcacacatccttacttgtacatagcttgaactttcaacaagtggacgcacccagataaatcagtcctggcaagatatagaacattaccaccaccggagaaagttcctgcattccttccccaacctttacgttcttttttgagtctctccaaagaaggatttactgattgcaagtgatctgtggttagtttatttcttcaaaattgtgctttgatcagttttatttcatgcaagttactttcatacttaggaatgcatgttgtacaacactttcttacaaattaatatttagtttgttaggactaatttatttctgacagaactaaagttttaacaagagtagcttagattatctgttttttacttggtacagatgttttccaatgactttattgattcttatcatgttttatgagatggctggtgagataacataaatagagatgcaaagacatggaggtaaaccatgttctgagaggttctttgggctgacacacctggtttctctggatataaagaaaaaaaactcctctttcaggcagctgtttcctacgaagattgtgtttgaggatacagtaacctcatcatttagcctgaaatataagttggttcacactgcttcttcagaaacagaaagctctatccttgtaataatgataattcatgacattccatgtttgtgggcagtagtttcagtcagctttaccttcaggtacctaacaaggtctggggttgatttggatctgccctgatgtgggttcacagagtcggtaaaacctcagctatccagaaagctaattgtctgaattgccagactctcaaaatggcctggaggcagaaagttaaaatgtaccacaatctctttggtcatgaagaagcagtttttgaatatctaacatagcggtagggatatggtcaaaatgaatgagttataccagcaccataaagttgtttaggggctgtaaagtgctcacattgagttctttgacggtaccatgaaactcccatttttggtttgctccttttcacaaatcactacttcagtggaatatgagactcatctctgaaaactcacacagctccttaagctcttattcacaccttgacatagtttttttgtgtgtgtgtgaatatgatttataaacgatgggtttattcaggtattttctgtaagaaatccacattgtataacttggagttacctatcatatggtaggcgctcagaagcttcttttacagtcccctttagaatgctacaaagaaatatgtagtgattttcaaaggtacatcatttagtagacagtttacgtttccttgctcacaaaagaatgcaagagaatattccagtagtttcaaaaagtacagtatgcaatccttagaaccaaactgcacaaatattcagcagctgtctattcaaaaattaaaaccagagaccatattttgttagggctaatgtatagttgtcaaactatagaccagaacaacaagaatctgtatgtgcatatttattctaatcttgttttccaagttacttaatttatagttgcttttctctgagaggaaaggacagaacaagtattgcaaacacttgctacagtcagttttggcaaaaaaataactcagagagccatgttttaagaaaaataaattcaggttataaatttaagcatcattctactgggttgcaacagtatctgagacttctactttgaatatttcatctgatgatgtaattggaggcggcagaagcatattatctgcatttatttgtgcagttgtgtattatgtaagtggagaattgtgggaaataatgactatttcccccctcctcataattttaagcctcaatggaatggaaagaaatatcaatcgatcttccatatttggcagagtgcttgcagaggccactgtctctgcaaacatgataaacctcattttccccttcccctgtcaacttgtcaagaacagaattaacaggaggattatattaaggcaaaataatttggggttttctgttttgtttttgtctttgtttttaaaagttacttccatgtgtctggccatgtttcagtaataatgtttggcactttaataattcctttcatctgcaaagagcaaattgtttttctgaaataatttcattttgtagaatgactccatagagcaggttgaccccatccatgatctagaatataagaattcatcatataacaaaggaccaccatttaatgccagttttagtatgttttcagcttcaactaaaaacttaagattccataataagagagaagtcaccaagccaattccctgttgagtggaatatcttactcattttctacatacatcctacctatccttgaaagttaagcataaaacctcaccttgctgaagctttcctcactgctataagtcaaatccctgtccatctctccctttcctgagtgcatattgcattggcttataaaccttttggtgttactctcctgtgtagataaagactgttaattactctctaattatattttatgtattagtcttcccatgtcttccaatgtaagtcctctttgcagaaacaccatcttaacacttattttgcatttccattcgcatttccttttcttgtttagtgttttggaaaactgtcatttaataaatattgttggccgagtgcctgaatgttaagagaggccactgtctctgcaaacatgataaacctcattttccccttcccctgtcaactcgccctaagaacagaattaacaggaggattatattaaggcaaaataatctggggttttctgttttgtttttgtctttgtttttaaaagttacttccatatgtctggccatgtttcagtaataatgtttggcactttaataattcctgttatctgcaaagagcaaattgtttttctgaaataatttcattttgtagaatgactccatagtgcaggttgaccccatccatgatctagaatataagaaaaatctcactctgaagttcagtttccaaagacttgggaacagatgatgaactatgctttgcttgcagtgcctcctggctgtaaatataggagctctgtcaactgctgaactcttggttggccttgcaaagctttggtgtggtctgtggtctggggtgtagcgttgagccagtaaaaggcattgcattgttttatccatcctgtgtccttagttagatgcatcgcatgattggacctactcaataagaaaataaagagcagtagtcaatgttttgaccatacttttggtcctgcacagtgttactagttgccaactttatgcaaacagatttacctcatctcctgataaattagaagatctggccacatgcagacttgtgttcttcctttagaggagacacacgctctccagttccacccagcatcccaagacatctgaattagtttcctgttgttgctgctgtaacaaactgccgtaaacttagtggcttaaagcacagatttattatcttacacttcttgatgttggtagtcaaataggcctgcaggaccgtgttttttctggaggttctgggggagataatgtattccttgccttgtccagcttcttgaagttgtgcacatcccgtgactatggctgaatccctctgaactctgtttctattgtcacatgtctttctttgatccttcttcctctctctttcatttttaaaggatttttgtgattacattgagcccactcagataatacagtcacctctctatctcaagatccttaatttaatcttgtctgcaaagccccctttgctgtgtaaggtgactattcacaggttccatgttccacaccccaaattcacttccccacttccaccttcagggaagcatctaattccttcaggctgtgacctctacagtgctgaggaactggcactgatttctatttccctggagttggatatttatccaccaaataagatgagaatatttatttaaaaaactgattctcccccttcacaaattaccgtatctaggtatatcttatttttaaatgctatattaaataatcgcacaaaaataaaacaactctcctttatttcttggcttggttttgctgctactgctgctgcttcttgttttgttttgttttgtttttttctcctggagacagggtctcactgttgctgaggctggagttcagtggcgtgatcatggctcacttcagcctccatctcccagcttcaaggaatcctcctccctcagcctccctagtagctaggacaaagggcacgtaaccatgcctagctaattttttttttattttttatttttgtacagacagagtcttactatgttggccaatctggtctcaaactcctgggcttaagaaatcctctacctctacctcccaaagtgctgggattacaggtgtgagccactgcacctggcctattcttcttttttttttttttcttttcaattttacctggcaatattgtatatttcaagccttttttacattgtagttttcttttcatctacatttcctactaattaagatgtttcttccctccttggtcccttgactattaagctctttaaagcctaattattttcccctgggaaattgctgctgctattgctatttgtggttttcttccttgttttccaacttttaatataacttcttgttaatcactagtccttccttcacaattgtcttatctttgtcatctgacactggaaaatgatatacattttgaacttatgactgtcatttatcagcagaacatagtgtaatattcatgtttgctgataagagagtggcaaaattaatgtcagaaatacagaagctacttagtaatctaagaattgagaaaaactcatctatccacaaattatttgaggcaggaacaatttgtccgtctttgtttctaagaatcatgacattttctcttttgacctgtcttattgttattaatactgatggtgtagctagtgaaataaatagatttctttttagttgattcatagatatgccattccagaactatagtaggacataggtccagaagaccgggtatacagcattggttgtcaccatcagcatcagcattacctgggaattgctggaaatgcacgttgtcagaccccaccccagacctactggatcagaagctctggggatggggcccagaaatctatgttttaacaagctctccaggagatgatgaagtgcaatcaagtttaagaaacatcagtgttttgtattgtcacactagggtgctggggagaagggtgaacccttctaggtctcattctctagatcagtttatgcattcatttgtttagcttccagggatgtcatttccaataaactacattctccaaatattttcagttccgataaacagtgcactaaagattctcagttccaataaattgtccaagtaaccttatttcaccatggaaagaataatctgtggattggcatcaggaagaaatagtccttcttagtttaagagtctacccatactgcttaaagcccaagttgtgccaaattaaatacaaatgttatgctggagtgcaccaatttattcctcttaggtccgtgtctcatccataaaattatggcagttccaataagtgatatgatatcaactcactgaaatctttaaaatgaatagacagctcactctatagaaaaaaactctactccctcccctcatctgcctcctgcagagtcattcaaagtaaaccccacatctaccacataatcccatattcatagcaaatcagatcatccctgacattatctccaaatttggtgaaaggtccattgggcctgttaaaatatcttaactttattgaactataatttacacggaatgatatggatccatctttagtgctcattttgcattgcgtgagtcttagcaaatgtgtacaccaccaccacaatcacaatttaggacctttctggcaccccagaaagcttgttccagtcttcttgaagtccatttttcccaaccccttggccccaggcaactactagtctgctttcctgtcacttttagattctttttgctctctctgggatttcatacaaatggaactatgtattctttttatctggcttttttctttcagaattatgtttcagagattcctccatgctattgtttcctctatagcttttttacattgctgagtaatattcaattgtgtgcacatactaccacttatttacctgttgatgggcatgtgtatatttccagtgtcaggctgttaagagtaaggttcctatgaacatttgtgtacaaatatttgtgtgaacatgtttttatttcttttgggtaaataagaatggaatggctgggtgaggtggtagacgcatgatcagatgtgtaagaaactgccaaattggtttataaaatggttgaactattttcattccatccagcagtatctgagtattttcactaggccatttttacatgtattatcagacaaatagaaaaaaaccttaattttatgttgatatctactgcatatttatttacattatgcacacatatgtaaatgtatatacatacacacaaacagggaaatgtatacatattttattatatcatatgaagaagcaccagttttcaaagtaaaatataagatcttactttatgcataaaattccaacccatgagcatatacacaaaacccttaaactacatataagtaatttctgtgttttccttagtgtttgtttactttagtcatttgctggccattactgacagtcaaatagcaaacttttaagaaaaataatagaaactctaacatgaggaaactgttagaagcttttttccctctgacttgggaaaagataactgccacaattttggggctgtgacttctggtattgtatcatgcaaagtttaagaacttctgggataagcagtgggcaaagggagtgcaaatggaggaaactgagaaagaatgattatataaggagcaacaatgatggactggtggcgaagaaagaaagatttttcaaggaggggtggttggaacttggaaatcaaataaggaatcaaatgaagatggaacccatggctgtggccccatggagacagaaaaagtcagatttatacacaggtcattgtgacactaagcagaatgtgaaaaaatatatccaatagaaataaaagcagcatgttagtaggggcaggagagcagagtaataaaaataacctcgtctctatatatgaaatgctggaattgctgaatagtgttcctggagtgtgggaataaacgatgtggttgaatgggtttgggtttgttttacagattttatcctaaagatatgataactaattaaactactgctgttaatttgtgtcgaataccaagcagagcctcgggactggactgagacagggccaaggtgctggtataaatttcagtgactcatctcttgtgtctaaaatagcggtaggcttgggggcaaagtataatcaagggaggaagtcattttgacacatgttccccttgaaagcaacttagaaccaatgtaagtaattcagtttctcaagctagtgttggaaaaggggtgtagatggataagggtgggaaatggaaagtgagcttgcatcaagtcatgaaagacattgtgttgtatgcaaagacgttttgatttgatcctacttgttttcaagatgactttaggcatacacttgggcctaaatgaaaatattctaatggaatacatgcaagggctcagcgattcttaagggattactttccatgttttaaacttttacgtataccctttcttaaaactgatctgcctaacacctgcctgtcctcatctcattttgtagaaggaagatacttatctcatctttccaaaatattaatatggtacattgtcctatggtataaaaacattccaagtgctaaacagaaaaacaccgtgttctgcaacaaaactgtgcttaaaacatatttgtatcatcagttgataaatcgttaaaaataattttggccaggccaggtggttcatgcctgtaatcccagcactttgggaggctgaggccagtggatcacctgaagtcaggagttcgagaccattctgaccaacatggtgaaaccacgtctccactaaaaatacaaaagcattagctggctgtggtggcgggatcctgtaatcccagctacttgggaggctgaggcaggagaattgcttgaatctgggaggcggaggttgcagtgagctgagattgcaccactgtactccagcctgggcaataggagtgagactttgtctcaaaaaataaataaataaataaataaaaataattttgaatttggatcaccttctgtggtggcataaaactcaaaaggagttcagagattgaaacttttcttagggcaaaaacattttatcagcacttatgtgaagaaaaatgaaaaactggaataaaattgatggtaaaactttgttattttagcattaagtaatattcatagatgtatggattaattttttaaaagccctatccattttatcaaaagatatatttcaagtaaagttttatatttaataattactaaaattatattaatatttatgatatttatgtggtttttgtcaattgcctaccagtgaaaactttagtataacttaattaaaatacattatttcacccttaggggctaaattcaaagtaaatttaaacttaaaattctaaattatgtatatattttgttgtatatagggatatatgatagatcaataaaatacttttagccacaaaaatgtattcattaggataaaattttgcaggggaggtagaaaagaaatagaaaaaaggcattataaaacataaatgttaagtgtgaacttgcttatttttaaataattttggtgtttacattctagatacatttaggtatatctaacagctattatgtttaaattgtcaacatttagaacattctagaaattatatctttaacaacccttttgaacttatgataaaaaatgaagataacttaaaattgacttttggtgagtttttctagatttgtctagaggggtataggcacagattttttgaggaccacaattatgggtaatgggatatcactgaaggattttgaataggggactgtttgataagattggtggctttgaaagggtatttttccattgtgcaggtggatagggtggcacatagaggttggggtgatggtaaaccaggaacaagtaaaacagtgaggagaagagagagggagagttcaaagcatgaaagggagcaggagactcaatattgctggcttcaaaggtgaagtaatagggccatgagattccttggctcatggccccattacttcaaggaatgtgggtggcttctagaagcttgaatgacaatgaaatggatgattcctctagagcctccttaaaggaaagaagccttgttcccatcttgattttagaggtgagatccatgctgcatttctgatctacagaactgtaagatgacatatttgtgttgtttaaagccactagtttgtgaattttattacaggagcaatagaaaacgaatacagcagatttacccaggttttccactgaggaaggagatgagtcatttgatactgagttaagtatgccaaaggttggcagtctagacttgtgggcattttagcctctttgagtacatgcttgttttagtgaatgagagaaagctgttatgaaggaacattttatatgaacttgcttgttttcatttctctacacctcactgtcctcttcctcaaagctaggggttagaatagattatctcaggttctcttcagcttgaaaattctaaaattatttgccttgcataaaatgaaagaaacaaaacacaccactatccccataaaattccttctctggtgagaatgaggggaaaaaaggagaaccacctacaagaattattggtaaaaacacacatagaattcactataaaacacaagcatgtgctgtgcttcagatgccttgtttaggaatgtttagttctaaatgctagacataaatcaacatatgttctggaattttcatgatgaaatctctcactgtgcatcaaagtaagagaaatagaaagttctgaacaggagcatgtattgtcctaacaatcttgtggccccaatattcatcataataaaaatttttctgccttggtattattatggatagtaattattatggataataaaaatgatggtgtattagtcaagatcggctagcttatactctgacaataaacaatttcaaaataaaaaagaccattagtactcattgttcagcgatttaaatctcacaagtagaatcagcctcttgatgggggatttttccattataaagctggtgctacgatctgaattctgcaaattggggcatttattagttagtgatcatatgggattggtctatggaaggatgcatgctgaagtcagttctttagggctacatcttgcctaaactcagtttagcatggctggtgttacaaccctcaattcctttctgcacaggggaataagtaatttctgatataactgctgcctttcacacaaaggtgggactcttgctaagctgctagagtgcagtcaaccttgccacaaagactatgcagatgacttcagtgttctcaattcctcccttggttgaagatcacattcacgcccatttcacccattcaaggactttcaggtgcaaattttgcaagaaaaagctcctcagatttcccaagaatcatctcattagaaaggagtttggaatgtgattctgtctggatgctatttctgtgataccttgaaaactttgttcctacaaaattatttaagcatttgagcacaaaaataaacaaatgtccttgaatttattatcccatatgggcttgccaactgctacagtgagacttgtggagatgataagtcccctgtgagtgaggcacttaagctgcaggacccatatgttgtgcctgattgtaatgcagagaaagttctttggaaactatgaccttaaccaagctttgaatagctgaccaagataaagccatcagagatgtcctaagggttgccattcatagagggtcatcaaaagtctttggcctcatgcactttgtgccaccctcctcactaacattctattcatgatattagtctttttgagacctcccaaatggtgctgatctaattcatttctgcaaacagacttcagatgttatgaggtgtctgtcagatgaggctcagggtaccaagcattgtttttgcttgccatattgatcactgttaaaggtgtatctgaaagtaagtcttgatagtccctagcaatcaaaagtgtttcctcaagtcctaattttttaggtgtttttccctataccttctgagtctcttacttcaggctgctatcacaaaatgccatagactaggtgccttataaacaaaagccatttcttaccgttgtggaggctggaagtccaaagtcaaggtgcctgcagattccgtgtctggagagggccctctttctggtttgtagatggtcttgtcattgtccttacatggcactcaggtcggggggatggtggaggcagagtgtttgtctctgttcttttataatgctgtaaatcccatcatacaggccccatcctcatgacctaatccaactctaattacctcccaaagaccccacttccaaataccattacactggggattggggcttcattatggaaattttgggagtggaggacacaaatgttcagtccctagcaatctcactaggacaacaaagtgagacaaataattgttctgtagagcttcttagaataacaccaatacagtctcccaaaagagagaaagaagatcaataataggggttctaggaaattgctttcagaccttgggctaattttatgaaatgattttgagaaaaggaagggcaaagtgagtaatagattttagcaacagtcatgagagtgggagttgagagggcggtgtctgttttgttgttctttgtccatagcgtctcacctataacctggcccgtggaaaatgttcaaaaaataagttttgtataaatgaattgatcattagctggagtggttttatagcaataagaattaccttgttgaagaattggttcttctttgcctttaaatgtcttcaggtttgggctccattcttgtagctagctgctgactattggtttaccccatgtaaagtgagtaaagggttgagggttttttcttatccttaggctatcaatcacctgcttctggggctctcacagttaaaagaactctttaaagttggctgtgctggaagctacccattataccaggctgaagtgtctacgggaggcatgttcttcgttttttgtctaaaattgagggttttggggaatttgctcaatcatcgctaggcctaactcaagtctcagtaacccgggaacctgtgagctattacagaagatgcatctgtagtatttactgagtgcatggatgggtggtttacagacttctcctcaacaaatagcagggctgtaatagcaagtgacagggagcttctggcagaggtagagattgaagggcaggtggttggcctgttgtctctaggaaatgaactcccagctcaggcgcctaggacatgggacttcggatttttaaactgggactagttgggtcacccagtgctgaaaccttggccctctgccgacaggctaaggggcttcctggtgtagctctcccttctcagctgtctcagccatgtccttcccatgctctgagacaccaccagcagcaacagtttggggatcatgtgaaagaaaagtaataaatacctattctgtttggtcacatctaattgctcattttcatcatatttacaaggaagaatacgcttacagggcctgaagctaccactcagtgacttcaggattcaacgtgtctttctgcaggggtcagggagtcacgctgctctgcctcacagcacagctaggaagaatctgtctgtgtctattaaactacagggagagcaccatttgaaatctcccctgccccggaggatgttgtccaaacataagtggtgtcccagagttttctctaactctccagcccaagtccctcttacagcccagggaagcctggggctcacctatctcgtgaaaatgtgctgtattgttggtgtcccagccaaggtaccccaagcataatggggtaactccagattgggtcactaagcccatctcccactacacaacggccacatttccctccctccctcagttagttctggggaggaggaagtgatgagggctggtgaggcttctccagaacaagatggagatgcaactctaaaaccaggtagagcgggaggcatgggggaaagggctgtgataccacagaggacgtagaaatttttttccatcaccacacataagaaagaagaaaagctgctagatttttaagtttcagttttggagtagtatcaaaaaggaccatcaagctggagatatttatttagataagaatgctggtctaatttatcattattttcaacttctcttgcttgtagttataattagtgataagtaatattttaagtgttttttaatggtttttggaaatattgtatacagacgtttaaagttgtatacaaattgaattagggaaaatggaatctcactttcctgtttgtatgtgttattgaaaaatattattttaattttacatcagatatcttgatacctcactggtattaggctgaaccatacgaaattgctgtttttgttgatcaaaatgattaaatattagttacttcatatagctcattgtaacatatttataccctgggtctttataaccagagacaagtggattaatctatgaagctattaaaaaattctatagtaaatatatttataaactgaagaatctgctttaacgtgagctactttccctgcactatcagtttttgcaagtttacatttttttcctgcaaaaagaggcaaaattaattttaaaaatctaaagccattggaaggtaccagaagatgggacgtttcaaagaaggaattaaattgaaggtagaaggcatcctatttcctacattgacttcaacccccaccaccttctgcaatgattctgaaggcgatccttgctcaaaggtgaccacctcagtattgtggtcatgggaaaaaacggaaaagggatcagcattctttagcttcttttatggctttatttcagctgggttttcaaattttacttgagtagatagctttatttggctcagaatgagtcaaagtggttttttggtgaatgtttcctttaccttcataagcactttctttaaagttccaggtgaaacccccagcatggtggacactgtgtcgtgatgtcattgcaggtgctctatttgagaagccatccatggtttcttcagttctagaaatgcttcagattgataacattactatgctcataggttttatgttgttttgaaattaaattaatatagaaaggaaccatttgagggtggtgacccagcattgtgcctcaaaaaaaaaaaaaaaaaaaaaacctctggtttttatgattaggaggcaatttttttttattcaactagttttgactcttacggaaataaaacatcgccactatgaaccgatttatgagctgtcaggtgatcttatgtgttgtatacatataacacacgcatctaggagctgttttaaaaatcttgacagttgtacattcaatttgtgtaatgctagccctactgtaaaatactctagtttttttgttgggacagaaccacacctaagtgaaacttgcagctagctgcccatctgcccatgaatagtttactacctatttatgtatttatttatttttcagacagggtctcactctgtcagccaccccggctggagtgcagtggcacaatcatagcccactgcagccttgaccacctgggctcaagccatccttctgcttcagcttccccagtagctgggactacaggtgtgtgccaccatgccccactggtaggggtctcactatgtagtgcaggttggtctcgaacttctggccttgaaaaatcatactgccttggcctcccaagttgcttggattataggtgagagctaccacgcccagcctaagactttgcttccttgtggaaaaactccctggaagggaatcccatattaaatagcaggtgctaaatagaaacctagtgtttgactgagtgataacattttctatagttttttttttatttatactgaaatttagaaagggcatattattcagttttgttcttcaaatcatccttgactcctctctctcacactcacacgtggtatggtaaattctgtctgctctaccttcaaaatgtacccaccttcttttcactaattcccttgctgccatcctggcctgagccaggttctctttcacctggatgactggtctcttctcatcctggcttgttccccacactgacccctctccgtagcctgttctgcactcagcaccgaaagtgactgactaagtgtaagtcagctcctgagcctccctgctcagagccctccaaggggtcctcatctgactccgagtaaaagccagagtctttaccgtgacccaccaggcctgtgtgatctgactcctttttgcgtgacctcatctctagctcactgggcttagtcacactggcttcctcgctgctctgctgtcatcctggggtctttgctgtggctgcttcctctcccagtaatgctctgccttcccccactcatccacatggctaaatctctcatttccttagtttttgctcatttataaagctagatttcttattaacattaacccctactccgttctctatttttgctttttccacagcacttaccatcctttaatatatggtataatttatttatcatgtttagcgtttactgcctctctagaatgtaagtgccatagtggtggcagttttgttttatttactgatgttcaccaagcacttagaaaagtgcctcattcatagtagtgattcagtaaatatttgctgaataaatgaacgcccattcaagggtggtgtggtgggtgaacccttattgtcccttgaccttggatgcctgttttaaaaaatcatgtttaacaaatcctaaagccattcttttatggtatgggtttcagacttcacattttacatatctactcatgagataagagtcaaaagaaagttttttaaaaaatagtatttgtcaaaacccattctgattgttttttcttataatgacagattagtctctgccaactcattccagaagcttccatttgatcctcagaggtttttaattggcacgaggctcttttcaggaaagggccactttaacatctatggaaaaataatcatgtacttttaattccacttatctgaaaccaactagtaaacccaaagaaaacactgggtgttttaattttttgaagtggcttgaattgtcccgaggtcatggcatccagtgaattcacttctttgtctttcctgtctggccgtttttgtgccttctgggtgtgaacaactcaagcggtttgccatgtgccaaacgagctgctgcctcttctcctttccagtggtgtggtccaggtccactttgcagactgagttcttttctctctgcaggtgccttctacttctagctagttatcttgtgcttctcttcccagcctgtttatctaaatgagtttcttttcctccagcccagctgcctcctgaaggtacaggaaacccccaatgaaaccatcagttctgcctctgatggtttgcctgtcctttgcctcagacgctgagacctcggtgccctggccacagtgacccttttatttgctttcctgctacttccctacctgttgttttattttttacttattattattattttttgagatggagtcttgctctgtcacccaggctggagtgcagtggcgtgatctcagcttactgcaaacttcaccttctgggttcaggcgattctcctgcctcagcctccctgagggattacaggtgcctaccagcagcctggataatttttgtatttttttttttagtagagacagcgttttaccatgtctgccaggctggtctcaaactcctgacctcaagtgatctgtccgcctcggcctcccaaagtcctgggattacaggcatgagcaccatgcccggcctacttgtcactttaaaacacagccatgcctccacccactgccgtgctctctcttcaagaaacaccagcaccacttcctgctctaaaacatttgcacacccctgctgaggaccctaatgacactgtctgtgtacctcctttatcacagacacttactcttctgtcttctgttttcgtggtgtgcgttgcttcatttcaaggacataactatgtaaacttccatgccagactgtaaaccctctgagggtgaggattacgttatatctgaccctatgtgtaaaactttgctgtgtatgggttcagtaagtatttcataggaccgtgaaacattactggttgaatgggctctggaaataaaactactgtataggccagagttctagaactgtccagatttttaaacattctgtccttttatcttctgaaaattatagttgtatttttccactgatagaaactaagttttagttggaaaatgataatttccgtaggcaaatatcatcctatagtttaacccttcacatgagtgaattgtgattgaaagaagattcaagggtgggttgtccatgttcctcttactattctccatgtgttttacatgaaggcattttgcgttcatttgggaattattcttataggtctctcagttttaatacaaaatgggttataaatatggctctggtagtgaatctctcaaactagaagatttctcccagccacaattcagttacatctagaagataacattcacacatttcttcattcatttcagcaaagagtgactgttatgtgccaggtatataatatgaattgatcagacacaagtccctgctttcgtggagcttacattccagggagtggagacagatgaacaaaaaataaaatgaaaagtgtgccagatggtaatgtgtgatgcagagaaattaggcaggggaggaaggatggaaagccagggaaattgtaatttaaaataaggtgattggcaggggcctgaaggtggtgaaataattagccctataggtaacaatgggaagaacattataggcggatggaacaatggcactgtgtgggagtcacttgtcatgtgcgaggaacagcaaggacatccttcttcaacttggagagggttggggagtaggactggttgattcagagaggtggaggggaattcagaccacttcaatttcttttcagcctcgacactagtgacattctgggttggttaattgttcattgtggagggctgtcatatagtgacattctgggttggttaactgttcattgtggagggctgtcatacagtgacattctgggttggttaactgttcattgtggagggctgtcatatagtgacattctgggttggttaactgttcattgtggagggctgtcatatagtgacattctgggttggttaagtgttcattgtggagggctgtcatatagtgacattctgggttggttaactgttcattgtggagggctgtcatatagtgacattctgggttggttaactgttcactgtggagggctgtcatatagtgacattctgggttggttaattgttcactgtggagggctgtcatatagtgacattctgggttggttaattgttcattgtggagggctgtcatatagtgacattctgggttggttaactgttcattgtggagagctgtcatatagtgacattctgggttggttaactgttcattgtggagggctgtcatatagtgacattctgggttggttaactgttcattgtggagggctgtcatatagtgacattctgggttggttaactgttcattgtggagggctgtcctatagtgacattctgggttggttaactgttcattgtggagggctgtcctatagtgacattctgggttggttaactgttcattgtggagggctgtcatatagtgacattctgggttggttaactgttcattgtggagggctgtcctatagtgacattctgggttggttaattgttcattgtggagggctgtcatatagtgacattctgggttggttaactgttcattgtggagggctgtcatatagtgacattctgggttggttaactgttcattgtggagggctgtcatatagtgacattctgggttggttaactgttcattgtggagggctgtcctatagtgacattctgggttggttaattgttcattgtggagggctgtcatatagtgacattctgggttggttaactgttcattgtggagggctgtcatatgcactgtaggatgcttagcagcatccccggactccacccactagatgccaggagcatactgtctcagtccatttatgctgctgtaacagaataccacagactgggcgatttataaacaacagaaaattatttctcataattctggaggctgagaagtccaagatccaggtgccagtagactaagtgtctgtgaagctctctgcttcatgatgatgccttgttgctccatcttcatatggcagaaggtagaagggcaaaaggacctggctagtttgcgctagcccctttataaggcactaatcccattaatgaggatagacccatcatggctcagtcacctcctaaaggccccacttcttaatactgttacactagggattaggtgtcaacatgaattttggacacaaacttttaaaccatagagcacaccttctcccccacccccgaggtgtgacaactaacagtgtctccagacattggcaaatgtcctcggaggcacaaactcacatttggttgagaaccactgcttcacaccaaagtaaggactttgttaatttgagtggttctttcattttaaggaaagtcctctggctggctgaaggggaacaaagatgggaccagggaagaaaattagcacatggccatttgggaggtgaggatacctagaagctgactggggctggctggcgatatggtttggctctgtgtccccacccaactctcatctcaaattgtaatccccacgtgtcaagggagggaggtgattggattgtgggaatggtttcccccgtgctattctcatgatagtgagttctcacaagatcttataaggtgctcttgtgccttccctcacacttctctctcctgccaccatgtgaaaaaggtccttgcttcccctttgccttctgccatgattgtaaatttcctgaggcctccccaatcatatggacctgtaagtcaatttgtaaacctcttttctttataaattacccagtctcaggcagctctttttagcagtgtgagaacagactaatagagctggggttggtcaggagtgaatcagattttggatatttggaatgattaaccatcaggatttgctgacagactggagaccaggtataaagaaggagtcaaaaataactacgaggatgtgggcctgggcagggaggatgcaggcaaggagcaggttcctggggacattgagagcttggtttgaacattttgtatttgagaatattgattattctctgtattctccctcacaataaccctgagaggtgggtatgctctccttttacaataagaggaccctgaagctcatggagcttggttaattgcccaaggtcacacaatctgtaaaagacagaaagggacttaaatccagacatgtctaactactaaccccctcctccttgatatactttgaagtgattttgtatggtttagaagcctccagtatgaagtaatagtatagtattttataccctgcagagtttaattcagtagactaatttttcatgaaatgcagttctgctaaatactaacatttcaaagcagagacagttgtttcttttgcattttatagcaggatagaacacaaacatgaaccttaggaagtattttgcatacagtagtaaaataaattacatggaatatcagggctatggtttgaatgtgtgtctccgtccaaaattcatacattggaacttaaacactgctgtgtggtgatgggactaagagatgggatctttaagaagtgatctttaggactagtgaccttataaaagggctggagggaactagataggcattttttttttttttttttttttttttttgctttccaccgtgtagggacacagtgttcaaggggccctcttagaagcagagaccaggtcctcactaaacactgaatctgctggtaacttgatcttggactttgcagcctccagaactgtgagaaataaatttctattatttataacttacccagtctgtgctattttattatagaatcatgaacagactaacacaatcagtggttagttggattttaagtgagttctaagttgctatttctccatctgtcctgttggtacctagtcctaccagttatatggcaaatcaatggtctgtggtcagttttgtttggaaatataccccgagtccctctgctagggatctataatacacagactacttctcccttctcccctccagcacctccaaaatatattaagcatctcacaggtacaggtggtgctaaaccatttttccatctcgaatatatttctataggtctgctatggtcatggctatgtccagatattaattcattctgtatgtttttttttttttttaaatatacacatccttagagcttaggtatgatgctagtaggctattttgctcctctgtcatttttctgccaaacccttctgactttttagctgtgctaccaccagaccactgagtgattaacgtgaatggattttcttgaaatagatcctgagaccttttgcatctaaaagcaggttccctatctctttcagctatataattgtgtatttaaacagtgggactcaacaaggtaattgcagtcttggagttcctagcagagtgagccatcgagccggcagtagggagctgtgtgccatgattgattccatgggggtttgggaaatttgaggtgatatgagccgaactgctctgaagagttgcccacaggtatctctgctgttacaccttgtatagttttgtgatgacttaacctaatataaaagatcacactgtcatttctctttgagaataatcagtgccaagggaggtttcttaggaggtctttggcactttattcttgatgagtttttggcagggccaggttcatgaatgtgtgacctgtggaattgcacagggttctagactcagaaaggtcctgcctgtgttttgtgtttggtttaaagatagctgtcagagtcttgaatttttttttctttttttttttttttgagatagggtcctgctgtgtcacccaggctggagtgcagtggtgtgatcaccgttcactgtagcctcgtcctcccagggtctccatagggaggccctgtctctacaaaaacaaacaaaaaaattagctgggcatggtggtgcacacctttagtaccagcaagtcaggagtctgaggtgggaggattgcttgagcctgggaggttgaggctacagtgaactgcactccagtctgagtgacatagcaggaccctatctcaacaaaaaaagaaaaaaaaatgtcaagacagtaatagcagagctttaattcaaacacagagcctttatatgctatagctcaggttggagcacctatccgttaattagcagttttgcccaaaaggggcctatgcagatctcaggcccctctcagaatctatgttctagttggaaacaagggctaatcatctgtatgtaaaacaagctttcaggcaagatgcaaaatgcttcttgatcagcagcattgccaaggtgaaagttaactatgcatgttcactcatcattcaacaaatatttattgagcacctaccatgtgctgggcactgtgctaggagctgggatggacgctatcttgggttccttgtgaagcagacgccatgacaaagatttgagtgcaagtgacttattggaaagatgatcgcaggaaatactggtagaagagtaagaaagtgagacagagacatgaaggaagccaataaatggtttgttttcacagagaaaaactacaactatgtgcaactagggcctaatccactgaggaccagtgtagaacatgcctcggaattttcctgtagaaagacacaggttggttcctttcccactaactctgatccatctggttgagagctgcccagggttatttccagcctgccccctgtgtcagaatgaacacaactcctcagctagagaaagctcttaggcaaagaatcacagcatttgtattagaaagctgtatgtgaatattagattagtgggtgctaagcgtgaggggatgaagagtgacaagttggggccaccattttgaatagattggtaggacagagctttctgaagaggtgactcttgaaaaaagacctatgtctttttaaaattttactatttcaaaaatgggagtcatgcatcaagaaaaataggattcttaagtcatgttgtatataatagacaaataataaacatatattttgatctttgggaatgtttatattcttgaaaacattataactttcagagagtatttggctatttggttggtaattttcttgacaatctctttttgaatactgtggcatcttttcatctatattctaggttttctcagtgttagaccattagacctcatgatcagaatattacagttttcaaaaccaaagttactgtcttctttaaagtatgggatatagtgtctttaagcatgaactgcttttttttttaaaaaaaattggaagctatcactctttttatacacattcattgtgaacttggtgtttcgtgtttttaaacaactgaatgattataagtaaagaaatgactgccttgagtaggatagtgaaataataggaagtgaaatataaattttcacattagaaaaaaatgattcccacttctttgttgggacaagaatgtgaagagtgttccttatgattaaatgactcaaaattgactcactttgtctaattaatagataggccttactgtttagatgtttgtattttacaaatgtattttccaacacaaaaccactggagggtgaactcaggtaattttagctacatttttttttcctgtaaaacatagtttcacatagctttaaaatcaacctttttgggccgggcgcagtggctcatacgtgtaatcccagcactttgggaggacaaggtgggtggatcacaaggtcaggagatcgagaccatcctggctaaaaaacggtgaaaccccttctctactaaaaatacaaaaaattagccgggcgtggtggcaggccaggcgcctgtagtcccagctactcgggaggctgaggcaggagaatggtgtgaacccgggaggcggagcttgcagtgagtggagattgcgccactgcactccagcctgggcgacagagcaagactccatctcaaaaaaaaaaaaaaaaaaaaaaagaacctttttttaatttccttacttcaacccaaatggatgcatctgtaaaattgtatctctcataaatcattctaataatatttgcggtgattataaaaggaaaatacatggggcttgctaattatgagaagacatttgtttgtttgcttgcttaacagttacttcatgcattgtcctaatgcttctttgcagaaatcttttagtagttagtgcctctctttttgtgcagtaagcaatggatcagactgtaagcttttactttactaagtgaggcgatggcaagattttaagaccaaattaggaagtttggtttttctctggaaactatttcatttttagtccaattttagtctagaaaaatagggttacaaacaaagcctaataattcattgcttaacagaagttaaatgaaaaactgcagtttgcatcaacttcctggtttttcgcaaaatcatcccgcatattctttttagctttgtgtggaactggggcttatcacactttaatgtggatatgagtcacctggagttggtgttaaaatgtagattctgcacgtccaacaagcatccagatgatgcagatgctgctggtctgtgggcacctttgaggagcaaggtttctgtgttggttaattttatacgtcaacctgactcggctaagggttgctcgatagttggtaaaacattatttctggctgtgtctgtaaggatgtttctagaagagattagcatttgaattggtagacagagtagaaaacagtgtcttcaccagtgcaggtgggtatcatcagcagttcattgagggggtgaatagaagacaagtgcagaaatggtgaattcttctctttctgcttgagcttagacatccatcatctcctgctctgcccttggacatcggtgctcctggttcttgggctttttgactcaggctgggatcccatcaatcctcctgacctcctatctcaggcctttggactcttattgaattacaccaccaactttcccggctctccaacagattgtgggacttcttggcctccctaactgcatgagccaattcttagaataaatctcagtttatatatatctctctatatcctactggttctgtttctctagagaaccctgactaatacagtctcagacaactggcttcaggattcatcttgcctaactgtgggggcaaaaccatgcctggggaggggtggactgctttgaaaaacaaagaggttttggagataaagttagcctgaaaatttttctgattcagacaaccttgcatcagaaaaattttgatgagccttgcttaggagtgcaaaaagcagacgttacagttttaagcagaaagggctcttgatgttaagtaaaggactggtagagattacagaagaatttcaggtactgtagtaattacagaggcagaactcttttctccttagcaacagtctatgtgtggggagcagaagcttgttatagcagaggtcactacagagaaatctgtgtgtgcaggcagagtcaaaagcaattgaaacaagtttgcactaatgactttggggaccagagtgccctgacaatggaataggagggccatattatcaggggtgacctctaatttgcaattaaaatgacttctgggcatgtaaatggacaactgggtgggaggattgtgtaatgtgggtggcactcagtgaatttctttatcttagactttgatgaaggaaagttattcccctgctccttgcaagctcgatagtgacagatggttgttgcttccttgctggtttctgttcctagaggaataaagtaggaattggtgttcagaattcaggctatggaaagatactgatgtttgggtggacaatttaggtataagaggacattggctgctgttactcaaccaaggcaaagaagggttgtggaaagtcatgaagattaggggtagccaaaactactcatgtgatccttgagcaggttattaacctcttctagcatcaggttagtctgctttcatgagggtaataaggcctatctttggtgggttggagattttatttatgaggggcctagcagaatatttagtacaaaggttctcagtaagcggaggtgttattttagaaatttatcttgaggtatagctcatgattagatttcaagatgagagctagagttctgaattgaatttaaacttgaatttcatcaatacagtatagcgacaaagcccagagggaatataagagatgtaggcaatgtaaaatgcaagaaagcaagatgctcagtgtagtaagaaaactggtagattaatattttccacaaatgtgacaaaatacaaatttatttacagagctcttggcacattaatgggtgaaatgcctggggctgtaatgattagaggagagttaaattcttgtaataaccagaacttagagaattattagatgcctccaggtaaacgaccatgtgggcctctccagttgtctttcttctgatcacctggttgtaacagagagattttattattgtcaacccataactcactgcctacccattaagcaattccacagattctttcctaggacctgtgctgtccaatatgggcaccacttgctgcaatatggctattttgcactcaccacgtagccagttcaagttgagatgtgtctgcaagtataaaatacacatcagatttcaaagacttagtatgaaaaaataatgtaaaatatctcattaatttttgtgtaatatatggaatacatgttgaaataatatttagaatatagcggattaatgaaagatattaatattaaaaattggttttaccttgtcgaatgtggcaactaaaaaatttaagttatgcatatagttcacattttatttttattgaatattgctgcctagaccaccctgggacctgtataggaattttctggagaggcttaaatcaaactcccttgttgccaaacagaaataaaactaaaccaggccgggcgcggtggcgcatgcctgtaatcccagcactttgggaggctgaggttggtggatcacctgagatcagaagtttgagaccaacctggccaacatggtgaaaccccgtttctactaaaatacaaaaattagctgggcatggtggtgggcatctgtaatcccagctacttgggaggctgaggcaggagaattgctggaacctgggaggcagaggttgcagtgagccgagattgtgccattgcactccagcctgggcaacaagagcaaaactccatctcaaaaataaaaaaataaaaaataaaaaaaaaaacaaaatcttatgctgattcaggagaacttctgagctgagaaccattgtcatttctcaacaaaaggactctgcatgagcaagttaactgaattcctgtggtaaacatgttaggtccctctaggtgtagtctcagagatataactaaggtttttatatcatttatacttagctttttcttaactttgttttaagtcagtatttgccaactattatctagaaagcaatgttttttctcaaaggtgtctgtcactagaacacattccccccctctcaaaacaaatacagtagaagaacactgaaacaaaagaaaaatcacatagtgtacttttggtcaacatttatcttgctgtaaaaatagaagaaagagaagaaggtaggttggcatctattaaatggtattacaattactggttctgtttctttgtggaatatggggaatcaacaaagtaaatttattctttctgatcctaagttgtcagggagttattgaaagggaattgcagtcctatttctgcagcagaactaatgtgaaaggagaatggtaaattaaataaggtcaaaatgatttagctagctgcttcagtctcctgaatgatcacatgtaagatgcaaataaatgtagggctttgtgctattaaatagagttatggtttttatcttggaatggatactgtgatgtggctgagtagtcatattaataggatatttttggtcactcacttgtccttagattatctcagttccagagatgggaatgattaagattgtaccctactcatgaggaatagaggagacagtgtgtcaaattggaatagaagaatgagcaatgaattctttcaccagcatatcactgtgttcccaaattttgatttaccattgtattctcttttttaaaggccacctatgaaaatagtagagggctattttgactctcatttaatctttgctgtatcttcaaagttgagagggatatcacatggcttgtgatttcataggagaggtttaggatttcagaagtgcttggataaggttggtctatactcttaacatggtgtgaggagcaggaagataatattgccaatggggactctattagtaagtgttaataaatgttgaagtacttttaaaagaaattccaaaatagtctctagtcttttttgtgtgtcatttcttttggaactataggattcaaagctctggattgtaacactaaatcaccttgacaagtccctagaatcataactagggaagtacattgggtttgccttgggaaagaaggatataaaaatggaggtgtgtttttcttcctaccctccccatcccaacagtggtggaaagtttcatttattcattcaataagcatttattaaacagtgtagaaaccccatgttagataactttgagaataaacctaaaggacggtacgttgagtatttgattccaagttggctttttcaatgttcccatcactgatggaatcctgagaaccctgttagcctagcactgactgtttctttcactcttggatctcagatggtggggacactgaaatctaggggaaggttgtccggtaccacttacaattccagtttctctggttcttcgaaattgtcctgaatttctttaaaatcattattcttagtcttgaaacactaggttatattcataacaaatggttttgatcttaacagcatccttaattttctgagagaaatgaacaaaaattggtattctaaatgccaggtctcccagatttttattatttcagacaattgttgcagcatgcgaaatttttaaaattacaatttacttattttgagtcttatctcttcctgcatgttgttcatgctctccactgcattaatcttcatctatttacatttcagtcaacctgtttatctgttgttaatccatcttctggctgattcctgtcaatctcagcctacaatagctcactgggaatatattacataaaagtcatcaagggcaggagagagagaatggtattctgattttgatctttactcagaattctcaatgactttccctctgtgatagcagcagatgttcccaaagttagttattgaaaatgacagtctcagtttcccgtttttcactcttgactctcaaaaatggataccagctacttagtatgtcactgtgttttagcttcttaaagattcatgttaaaactattcattgtttttcagactaagtgattgtagtttctttaactttttcaatgctgggtttgaaatcatttccctttcttacacgtctgaatgcaatccatcaaccaatgctgttgtctctgttttcaaaatctgtactgaatccaacagcatttcccaatgttaactgttaccgcctttgaccacgccactgtcatcactcattcagactcttgcagtagcctgttagctggtttcggtgctttgttcttgccctgccgtagtcagttctccaaaagacaaagtgttcctttaaaacttaggtcagaccaggcaactactgctcagaatgttctgattgcttcccatttaattgaaaatcagatccaatcattgtctttttctgtgatctgactcccttttacctttctgatttcatcccttctggtgtcctcctccttcacttgctgttttccagctacgttggtctcttcacccttgcagaatacagcattcccctcaaggcctttgcatctgctggtcccactccctggattcctcttcctctcagtcttcttgaggctgactcactcacttctctcaggtctttgctcataagtcacttcatgagtgacacccttgccaaggccagttatctcaagtggtaaccactacccctcccctccccccagcttgctaggaatgcaataaatatttgttgaatgagtaaaataactatttttcatggaaagacatttaatttcctgttccatctatgggaatagataaggaatgcataaaatgatcctcagcagcagaaggcaggtaaacatgacaacaaagtgggaagaaatcagacatggtaaaaattccatatcatatatttagttttcttaaagtacaaacagtaacagaataaaaagtgaataagttgtttaaaaatggaaatcttccttggaacagctaatatttataatcagatcattattatgcaattatgtaatgttactggtataattttgtgttttctaaatattaaatgctcctccctttgcaattaaatttaaactatcaatatgcttgacaaactgccttttataataaaatgtacctgtgtgtatagtactgtatatatataattgcatatgcatgtgtttgcattatcaataatgtaggatttttatactcataaaagttatgatgtattagaattatttcctattgctaaatgggaatctattgtgattattattattggtgtaatattaatattggtaggtattaggcacatatatgcaaccttgtagagggaatatttcttctggaatcagatcttctgcatgttataactgtgtaaatttacttaactgtctgggcttcttgccttgtttttaaaaaggacataataatacattacttatttaaaggtagaaaggtagaaatacatggtactctaacatttgacagattgcaaagagtcatcattttaaaaatcacaatgagatattatcacacacctatgagcatggctaaaataagaagaaaaaaaactagatggtaccaagtgggtgaaaatgcagagtatctgggattcccatgcattgttgggaatgcaaaatggtgccaccactttgaaagacagttggacagtttcttacagtgttaaacatataatacatataacccagccatgccacttgtgggtatttacctaagtgatggaaacttatgcataaaccaaaatctgtacactagtgtttatggtagcttcatgtagagtcatcagaaactggagacaatccaggtatctctcaactagagaatgaaaaaataatatctggcatatccatacaataaaatactactcagcagtaaaaaggaacaaattagtgatgcatgcaccaacacagatgaatcccaaaatacattacgcttcctgaaagaagctggagtcagacttggaaggctacatactatatgattccatgcagtaaaggcaacattgtaggaaaagaatacagatcagtggttgtgtgggagtgggaagagagactgactgtcaaaggggcagcctgagggagttttgaagtaatagaattgttttatgtcttgattgtgtggtggttacatggctgtatgcatttgccaaactcacagcattgcacatgagagagtctattttattgcatgtgaattaaaaataaaaataaataattatcttgatttttaaaaccagttatacctctgatgccaggcattgatgaatcctaaatgtcctaggtgggtgatcacatctgctcttagttccccattttattttactttagttgccgtggtttcctggtgtggctttgtcctgcttcagttattattcatggcatgatggactttggctctgatgtcagaggtagcaatggtggaaagctttcccacattctcccagaagcagtttcatatccttagagggaccttgccagctgactggtctagctcagtggtagtggtgctgacaaaggctgggatcttgtcctgcaacttcgaatttgtagatatatcagctgctttagttcctttataaaaaccaaatagaaatgaataggaaacagaatcagagcaggctgtttttcaaagaaattactccaggctatgcatctggggcccttgttttcaatatggtacctgtctcagggctctgacatcagcagctgtgttctgggtcatgaaaagtttgcagactccagctccatcaaaaaaacaaaaacaaaaaccaggtaactgctgtatcgcactgtgttgtgccccagtgggccagcatatgaggtaatgtctcatggaacagatggttgaccagttgtctttggtaaaaaaaaaaaaaaaaatatatatatatatatatatatatgacaaatataaatactaatctaaacatataatttataactagagaactttaggcatttgggggttcttgtaagctgtacttactcttcttctgttctcacttactggctagtagatacattttatgtttgttgagaatgtgactaatgtaaaggtccttgaggtcatgaatctcttgtaaaaccagcctgtttccagttttctagactattttggatcctctgttttaggtatatcaccctgcttctatacagctgtcttaagagtgctataaacctagattgaacaggaaaccagcttcctaccagcaggttagaagtgacttacaataaactaaaatgagatatttttctctctggcattattctggagcaacagctcttgagtttcctatgctactattcttagtttaatttgcacagatcattttctctatatgcatagttatgtcagtgcagaaataaaggagtgggagaggaatgtaattgagtactcactccaggtttcaggaatgtgataggcacttttcgtgtattattccatttaacttcacaacaatgagttaggtagataattttgctgctttacaaacaaggaaactaggtccaggagaggttaatttacttatattctcaaagataggtttctctcactcccaaaaccactctatattccgaaggctccatttgggaatagtgttttttttttttttttttttttttttcccatttctttgtcacttgcaatgggggatggagattgcactggtcttttgagattgagacctggagcttcttcttagacctggtctgagaaccatgtctgttccctgttttacttttcagagtcccaagagatttggcctaattttatgtatttcttaaaatctgccattacacacgtttgatcacttggttctttctcccccatgactgcctttagaggaaaattgagtcccacagttgcgtggctctgaacaggaaacccataaggctttcttattttaataattctacttctaatcaccacagggaaataggaaagcaaagagaagaaaaaaaaacaaattaaaaagattcaaaatagttaaaatcttagtcgttgagtcgttgagcccagtttacatagtttctgaaacttagttcttatttcttaaaagatactaaaagtcttttttttttcatagagattacttttatttatcattggaactgtagttcaaagcagattcaagttggtaccacttgtgaaattttccagtcactatccaagctctaagattttttttgcgggggtggggatcgagtcttgctctgttgaccaggctggagtgcagtgacacaatctcggctcactgcaaacctctgcctcctgggttcaagtgattctcctgtctcaacctcttgagtagctgggattacaggcgtgcagcaccatgcctggctatttttttttgtatttttagtagagacggggttttgccatgttggtcaggctggtcttgaactcctgacctcaggtgatctgcctgcttcagcctcccaaagtgctgggattacaggcatgagccaccgcgcccggccgctctaagactttcattatgaaccagtgacgtaagaaatgtctaagaagtaaagctatatgtcatgttaaagagactgccactggatgggactggggaatgtatattaggcttaaagaacttttgccgccccgtaatgaaagccagagccacgtgtgatcattgaacatttgaaatgggggtaatttgaattgagatgtgttgtagcagactatacgttggattccaaagactcagaatgaaaaaaaaaacccgaatttaaaatttctgaataatttttatattgattacatgtacattgattatattttaaaattctatgtatactgagttaaataaaatacagacagttcttgacttatgatggttctgcttacaattttttctcttaacaatggtgcaaaaatggtaacacatcctttagaaatcatacttcaaatttttatatttttgcaggctagcatatgtaatgagtttctcttgcaatgctgggcagtggcagtgagccacagctccaagtcagctgtgtgactgcgagggtaaacaaccgtgagatattcaacgcttaactataaaataggctttgtgttagatgattttgctccactgtaggccaatgtaagcattcggagcacatttaaggtaggctgggctaagctatggtgtttggcatgttaggtatgttaaatgtatttttgacttaccgtattttcaacttaggatggatttttcaggatgtaaccttattctaaatctagagcatctgtatattattaaaattaaatttacctttttaacttttaattttgaggtaattacagagtcatatgcagttgtaaaatataatacagagaaatctcatatatcctttacccagttttccccactggtaatattttacaaaacagcagtacagtggcagaaccatgcaactgacgttgatgtaatccactgaccttattaagattttaccagttttacatgcactcatttgtgtgtgtgtgtttttagttctatgcaatttaatcacctttgtaaattcattatgacacgaccacagtcagaaatggaattccatcccaaggatctctgtgccacagccatctcccttccttctctcctctctaacccctgggaaccattaatctgttctttacctatataattttgtcatttcaagagtgttatagaaatggaatcacatagtatgtaacttttgaaatgaggttttgtcactcagcaaaattcccttgagatgcattcaagttgtgttatcaatagttatttcctttctattgttgagtagtatttcgtgtttcttttaacctttgtaatgatgccactagaaagctgaaaattacatatgtaatttgcatttctggctttcattgtgtttctattggacagcattggtttaagggaatgtttgttagaagtaattaaaaagcatatttctgttaagattttcatggaactttaggtattcctgtgttaaatggtgtattttgttctgctaactttaaatcaggttatttggaaataagcaagggagcagtggctttaaaaaaatcatttcaagagagtaaaattatctgtgtccctcccacatccctcctcctgccttttttttcttttttctttttttttttttttttttttttggtcagtttttcagtaagaaaccctttgtatttctatccacaaaagaaacttttcatcaggttaggcagcagaggggcatcttgcaaccactcccatggcattcagcacactggtttgagactaattaaatggctcatatttatctgatattttccctcttgggagctccagaaacttttttctttttcaactgaagcttcaaaaagaaaccagctcagttagcttatgaaggagggaagaaacaggacacagggacacttcagagcagattagaactgaggtaaaggagactaccattttcaattaaaattgcctggggaaattaggtaggcagagaataattacctgggttggcacacatccaagtttctgaaactaagaccctgcttggatgttctgagggatcattgacaaacacaagtagccaaggaccttgaagtttatgtgtcatctcaaatgtattcaagagttctggatacaatggatggctattttaagtcaaattatatagcatgagatgttctaacaaaaccctataaaaaccaatacccttgggaggctgagatgggtagatcacaaggtcaggagttcgagaccagcttagccaatatggtgaaaccccatctctactaaaaatacaaaaatcacctggcatggtggtgggtgcctgtagtcccagctactcgggaggctgaggcaggagaatcacttgaacccgggaggcggagtttgcagtgagccgagatcgtgccactgcactccagcctgggagacaaagcgagactctgtcttaaaaaaccaaaacaaaacccaaaaaccaatacccaaaacaaacgataccacaaagcatcagattaaaggaggtttctgtgacaaaataaatatacatttctgtgacctcagccatgtaaccaacaggacactggggctgagattgaactgtaggagaacatgaagaggactgattaaagtatagttttagtctcttacctccttaggcaaggggccctagtacattaacagtccttggttagcatcttacaagtaccaagaaacatcactgagtaaatgtcctaacacaaggacttgtccaacctagtcgtgcaaatgagtcattgaaagcaaatctgccttgaatgcaaatgtcaagatttagtattgtactccccaccccagctctacctccagtgacctattactattatacaactgctaagcatggtttctcagggtctgtgctgcctgtggctggtggcacgtggtgccgtgctgccattgctatggggggatagaatcgatggaaaaggttttcggttattgaactatagattttttctttctcattacctagaggagggcccaccatctgctccacaataggaaagggatccaatcatgtttcttacttgcttctagtgttagcttttgctgtgttttcattgtttcataatctctcaatttcaaaatggtgcatagtggaagagggtttagaaggaagaaaagagagaaaaaggaatcaattatatttttttctctttcctctttcaaaataaaacacaggggtagaggaatacttgtattattttcttttttaaagagattttcatagacttgctgaacaaggcagctgctggtatatagggtattttaacgcaaattacagaaatgtacccctttccagggctgcaggcctcactcacctcttggtcatggacatgagccgtatctgtctgagtgcaatgcatgtgtgcttggccaccatcttgtgctgtataatagatgcagaaatagcccctattttatactgtggaagcacagatggatgcacagacagttgccttaagaggaagggtcccagggccagtgcatcaggggtgaattcatgctcctttgcttacctgtcatatgactctggataagtgagatgactactctgtgcctcagtctgctcatctataaaccatttctgtctcatagagtttgatgagatataatgagttaatatacataaaacactgagagtggtacctggacatagtaatttctcattgattggtagttattactatttgcttctgacagttttgctgtctaaccaaacatgtttctgaagggagatttcttgaggattctcatttttttaagtcttatctaataagccatgtactagtggatatattaagcaggattttaattatatttaaacttttacttttttttttttctttttttctgagacagggtcttgctctgttgcctaggctggggtgcagtggtacgatcacagctcactgcagccttgacttcctcggttcaagtaatcttcccacctcagcttcctaagtagctgggactacaggcatgtgccaccatttctggctaattttctgtattttgtgtagagatggagtctcactatgttgacgaggctgatctcaaacttctgggcctaagcagtcctcccatcttggcattccaaagtgttgggattacaggcgtgagccaccacacttgacctgcttttactttaaatattagtgtggttatgtatatgctgcctctgtgtaacttcccaataatcaagtcagttgaatgaaagagcagtttaaattggttaacaccatgtacaaaatataacctaatttaattaaaacattttggcccatgttattaattggataccctgtcctaacaaagcaaaacaaaggaaacccaaatttttggtccttctaggtactgagtgtgtgtttgctgctgcttttaaagaatgtcacttttctagacatctagtttcataagatttagtttaaggtcaagaggagaaacatctcttatagatttagaacttggtagagtacagatattctttgcagtagatgtggaagtccaagaacatttgggagaattgttaaaaatgtactgactggttttatttagcctctttgctggtcagttagcttttcttgtgacatagctgcagagtcaagcctgagttacatagatgacaaatgcatgctaagttaggtgttaacaggcagaattctaaggtggccccccgagactactgccccttggtttacatctcctgtatgatccccaggactgtgactatgacgggatgtcactcctgtgattaagttatgttacatggcacagtttactttaagaataaaagtttgtccttgatggaccctaaaaggggttggagagaccgattcagagagaaagattccatcaggggagattctccatgactggctttgaagatggtgggggccatgtgacaaggagtgttgatggcctctaggagctgagagtggcccccagccgacagcctgagtgaacttgtaagcacattatttctctgagcctccagaaaggatgaagcctagccaacaccttgattttagccttgtaagatgctgagcagaaaacccagaaactcctggttaacgtggtgaaaccccgtctctactaaaaaatacaaaaaattagccgggcgtggtggcgggcgcctgtagtcccagttactcgggaagctgaggcaggagaatggcgtgaacccgggaggcgaagcttgcagtgagtcgagatcgagccactgaactccagcctgggtgacagagcaagactctgtctcaaaaaaaaaaaaaaaaaaaaaaagaatgaaaaagaaaacccagaaacgatgtctggactcctgacctacagagctatgagctaatgaatgtgtgttgcttcaagtcactacgtttgtggcaatttgttatgcagctgtagaaaactaatacacgaaggaaaccaggcaaaagaatgtaggttagcaattgcaaagccattaccattatttagagaaaaataacacccataaaaaacttgtaatgaactcctctaaagagccctgttttgcattgtagagccagttggccacagtaaatgacagatagaggtaagttttctgggcagagtttagatgctttctcgggaggggaaatgaatggctaaagtagctctttttcttggtgtttactgcatgacggcaaagaaaaaatacagaataggaagttggaatcccctcccttccatgcttatacatgttgctgatgagggctttcatttagggatcactcacttgggtcggtgagaggagaacataggtgacggagttggctgggtggaagtgctctggagggcgggggctgtggggatctgaaaacccaagctttctctgaggggacagatgcctctcagctgtggctgagttgtctgcagcattctgttgccacatcatccaaatttctaagagaagctgggagtctgtatatttatgtgtagtctctcattttttaatgttaataaccggctcaaactctaaaagatcaccatggattcatataaacatatatgtggccagatcaggcccatgggcagcctctctgtgaatgcagcctagagaattagtatatgggggcagttccagagactgagagaattggagggggtgagtgccatgagttctagaagttttgtctgtttttttcactgccatatactcaaactgagaacagcatctggcacacagtaggtgctcaataaatattgtagcacgaacttgaggaaacataaacatattaataccttacatggatatagaaaatatgactgcattggtgaaacttgtttctaagatttgattacttttaatgtctaggcatggtatgatttgggctaacacagtgtccttttggcccacccactttctttttttaacctgcgattcattcgagggcttttatggaagtcattaggtgctacagaacaaagcaggcattgatcccttctgtgttgcttgggtgccttgctcctcttatctcgtctcactctgaccctgacttctaagatgagtcctaacaccgcctgcattttacagataggagctggtttcagagaggtgaagacagttgcttgaaactgcatagctggtcaatgatggtgctcagctcttctgactgccaggtctttgcccttcatctctgtgcttgatactcagcatgcattggaaccagtcatgtcagcatcacctgagagcttgagcttcacacatgctgaatctcaggccctgcctcagacctacagtcaaacagaatgtgcattttaaccagatatgctggtgatttgtatgttaaagtttgagaagcattgtcctaccccactaggttctaaacttgggttattcctgaatcacttttatggatttggccaaatctgagttttacctgaacttatgactcatcttttccacttaaatgtatttgcttaaaaagaaaatacaaccatgataatgatggtaatgtggtaacattactattataagtagctgtaaataattatagttatgtacccaatagaagttatgtacccattcaatagaagaatgattccattttctataaatagaaggtaagtgctaatgcccatgcattctacattacctctccatgtaccattgtaaaatatctgtattttaagatggtacatggaaactgtaccattaataataaagtgtaataaaccataaaatatctcttcatggaccattagtgggagagtgttccgctttgggaaataatgctatggtcgattgtaaaaacgtccacaaggtcttccccactgtacattcatggctttgcagtgtgcagtgccccatcaagaggtgggaccatttctctatcttttgaatgtgggcttgaccatgtaactagttttgccaaatgatatattagccaatgcgatacaacagaggcttggaaagtgcttgtgctttggggcctgccttcttgcttctcttgcaaactagagaacaccaaaataagtggttattgatttaagctacaaaagtttgaagtctttgttgtactgcacaatctcactgacacaactgctttccaacattctgtttgcttgcaaaacaatcatttccatgttcagtattaagtcagagtaaaatgatctgtttttgttcaaccttgcccagttactcttcactttaaaacaaaatctgaatattgaatatcttgggggaggacatcacatgctagtctttttgtgttcagtacatatatagattcactaaaacaggcatggcaatgtcacctttaaatatttgtaggtttcttcctcctctgagaaataaaagcttcacccttggctaaagttccccattgctttgaaataagactatgtaaaacactgtggcatgattagtggtggtttacagtaaaatattggtgttttcttatggcttgaaggcagttccatatgtatgcttttcttttgtcagggtaaaataaaattggatgttttccatcacaaggaatcccctgaagaatcacaataagactttttaatatatataaattttatcacttactgtgttttcttgaagaatgtgagtgttttctcatttttggaaaaagctgactggcaaactcactatgtgtattatagcctttttttaaaagactgctttcatgaagtataatttacatatcataaaatgcactcacttaaaatgtacaattcagtggtttttagtattaatatattcgtggcattgtgcaactatcaacacaatctaacctttgaatcttcattaccccaaaaagaaatcccatgctgctcctctagtcatagagagccactagtcagctttctgtttctgtggatttgcctgtagtggacatttcatatacatgggaacataccatatgtggtctttgtgcttggcttctctccgttagcatacttttttttttttttttttttttttttttttagacaaagtctcactctatcacccaggctggagggcagtggtgcagtgcaatctcggctcactacaaactctatctcccaggttcaagcagttctcttgcctcagcctcccaagtaggtgggatcacaggtgtgtgccaccacacccagctaatttttgtacttttagtagagacaggatttcactatgttggctaggctggtcttgaactcctgaccttaggtgatccacccaccctggcctcccaaactgttgggattacaggcgtgagccaacatgcccagccagcgtaatgtttctttgaagttaattcacgtagtcatgtgtatctgtgttgcatttttgaattgctggataatattctattatgtgaacgtactacacgttttgttaatatgtttatcagttgatggacattgggattgtttacaattgggctattatgaataatgctgctatgaaattttacatgtaatttttatatggatatatgttttcattttttcttgggttcatatctaggagtggaattactgggtaatacagttacttcatttttaaccatttgagcaactgctagactgttttccaaagcagcagcatcattttacatttccaccagcagtgtatgaagtttccaatttctctaaattcttgtcaacacttgttatgtcttttgattatagcttttctagtggctatgaagcagtatctcattgtggctttgatttatatttccctaatggttaagtatcttttcatggttgtatatcttttttgggaaatgtctattcaggtcatttgcccatttttaaattgggttatttgtctttttcctgtccagttctaagagttcttacatcctggataaaagttctttatcagatttcctgttctgtgggttctcttttcacttttttgacggtgtactttgaaggacaaaagtttttaaagaggttcgacttatcttcttttttcttttgttcttcatgcttttggtgtcacacctaagaaaccattgttctggtcacaaggatggtgccacccaagatcacaaagatttactcctatgttatatttacttttaagaattttatagttttacttctgtgattcacttggagctaatttttgtccatgttgtgaggtaggagcctatcttcattcgtttgcgtgtgagataccatatgtggtctttgtgccagttgtcctggcaccgtgtgttgaatagactgtctctccccattgaatggtcttgatacctttgttgaatgaaacagcttttgtttgcattaacactgatacaactctgggatttgcaattttgtttacctattatgggaaaatatctttcttctttgaaagatcaaaacacgtgggaagacatacataaacaccccagacacacacacacacacacacacacacacacacagcctctgtctctcacacacacactcatgcacacagtcccttctttaccaaagccccatgtaatcccttcatgacccagaataatagtatttgaaaggaaaagttggtatgctggagtcttcattcacatattactacaactccaagtcagttgcaatagtttggctatgatatgccagtagctaaatagttcatgacaaattgcttatactgcttaacttctttgtagttaagtatttcaacattgccttccccacatgttgcaatatcttatatatgcccagaattagaaaggtttatggaacaatgaggcagtttatgttagatagttgctagggaattaaagaagagaagggaaaacatgtgtccagtctctaagtctttgattacgaaatgacttgggcagcaagtggtttctcaaaacgaggagcatggtatggcaggatcattaatcaatgagctttttgggaactcggcctgtttcatagcctcaggagacataaaagagtcatatagtttaacattccagctgtaggtaggccacctaattattcagcattcaacaaagatttattgagcatctactctgtgccaggcgttatggtaggtattggggaaatacctagtggttttcaataacacataatccctgtcttcatgggagtcgtatcttcattattaatacataattacaaatataaatgtaagattgaaaatctggtaaatgtcatggaagaagtggcactgtaggggttaaacatgggcgagggtgcctgggtttgaatgccagttttgtgggattcttgaatattcaacttcttcattcccttttctataaaatgagagtacatacatttttgagtttttatgtggattataaatgatgattcaatccatgcttagagccagcctgcatcatagtaaatagtcactaaattagtaaagtcagggtacatgatgctgtgtattccctaattctgtatatttgaagtgggatgttgctttctgtagagactttggagtgaattggctttttttccattttaattataaaaattatttgcttcatggtaaaatattacataatggttaaatgttaggttaaaatcaaagaccttaccctttaaaaatctccttttagtactggtcccctagagggagctagaggtagccacactcagtgtttcttgttttccctccagatgcgttatttgtgtataacgatatatatgtctgtgtatttacatatagattagtgaggtttgtcttaacacaatggagccatagtatccatattactacactacttcagactttttaaattaataaaatgacctgagaatttgtttctatgtcttttcatataggtacagatttcctctcttgtttttcatggtgtagtcttgtattatatgaatgtaccaacctacctgagaccttattaaaggactgtgctgtagtcatctctatacatagatcgtgaccttcacaaatttcaattcaaactttatagacacagttttcccaggtgtcatcagttgcctctgccttcttaccatatggaaatgggcttccccttacttttgtgtacttctttttttttttgagatggagtttttgtttgtttgtttgtttgtttttgtgagatggagtctctctctgtcacccaggctggagtgcagtggtgccatctcggcttgctgcaagcttcgcctcccaggttcacgccattttcctgcctcagcctcccgagtagctgggactacaggcgcctgccaccatgcccggctaattttttgtatttttagtagagacggggtttcaccatgttagccaggatggtcttgatctcctgacctcgtgatccgcccgcctcggcctcccaaagtgctgggattacaggcgtgagccactgcgcccggcctgagatggagttttactccgttgcccaggctggagtgcagtggcatgatctttgctcactgcaacctctgcctcctggattcaagtgattctcttgcctcagcctcctgagtagctaggattacaggcacgcaccaccacacttggctaatttttgtatttttttgtagatatggggcttcaccatgttggccaggctggccttgaactccactcctgaggcaagtgatctgcttgccttggcctcccaaagtgttgggattataggtgtgagccactgcacccggccacttttgtgtacttctgacaccacctggaacttttcctcccactccaccttgaaaagatcctgaaatctagatttcagccaaatcagaaatccaatgtcaaatccagaatcaacataaacaacttaataacaaagacaatacggaaacagccataaaaaaagactctctttgcaaatagatgtaattctgttataaaaagagttttttccaattacagttcatctaaggacattatactgctaatcaggaaaagataattatatttactttgagaaggttttagatagccttgttgttctattgctgcttaattattttaatagattaagagggtgagtaggatattagcagcattgtagagagagtgtataaactctgttggctgagtatagcagtaataattctgatatgatgactgtgtgtctgtgtcatttgtttgcaacttatgccactaatttttttttgtttttctgacgtttttaaatttacattagattctgattttgaagtgcaaaggactgtttttctccatgaaaactctaaaagtcctttacatcgatttgtcttgtctgtgtctgtttcagaggacagtgctgctgtgagtttgacgaagtggacatcacctgcagtcagtccagagctgcccagtgagtactttaccgcctgtgtggagagtctttggttgtaggtttctagaactttcagtctgtaagatgaatcccttcattctggctgatgctgcttctgaaatgcctctcaaaactgattcacagacatcttccttgatgcggcagagcattaagcaggatctcccagcactttctaggttcaattttattaatttcactactaaccttgggcactttaccctttgctagattttctacttgctctctgcaatagtgttgcccgcatttagtaagcatcacatgtttttgaagtgatcattgtctacaattctttctggggagaaatgtttctgtgacttgttttcagtcctgtgcagattttgcttaagaagattcccactgatgtgaaaaatcacaactgtgtacattatcagcaaaaatcctccattttgggggaactaccaggggatgatgtaaataaattcttccagtgctcccctaatggttcattttacaaacttttaaagaaacgcaaaaaggggaactggaaatatctttatatggctgatttgttttatttataaactgtaacttgccaatacttgtattccagagccagaatcctagtgaatatgagacatgttcttttataatcccttgatcaaattgctgtttgtttatttatttatttttgagacggaattctcgctctgtcacccaggctggagtgcagtggcgcaatctcggctcactgcaacctctgcctcctgggttcaagcgattctcctgcctccacttcctgagtagcattacaggtgcatgccaccacgcctggctaatttttgcatttttagcagagacggagtttcaccatgttagtcaggctggtctcaaactcctgacttcgtgatctgcccacctcggcctcccaaagtgctggaattacaggtatgaaccaccgaacctggctcaaattgctatttttaaattgctgttacaagtaaagcatttggactatgtatcatttcttaccttcaggaacaagaggtcattttatagtaatggcgtgaaccagcaactttattgtttctcctaataggtcctcctggaggatctgttcctctgggctgttggcatttaatggctgagtgttttcctccagcgttttgcatatcatgtgagatacttcattatcttctggcagtgcccgtggctgattttcttccggcctttccatgaggggaaggaagaatcgcacaacctgacacttctctaagtgatcagtgtttaatgatgacaagagatatccagaaagtagatttattattgaatgttcctatctatttttagtcaagtgcgctatcttttactactccccaaggatgactcataaaccatgtcttagtaggcaaagaggagttggggagtaggagggactgaataattctctcgggactttaaatcagtgtggacacatcatctgcttttcactccttcatcacattaatctggactatccactttctctgtttaagagttgtattatccttaaataggtcatttttcatcagctgtatttataaatggttcctatgacgagttatgtgcttattgaatataaacacttgattcaagagtccaaaaaaagaaccccagcagagctcagaagttttgttaaatattttaagttcaaagaagaaattcctctacattaaggagtgtaaatgccatgcatttaattttacaaagccttggctgggcgcggtggctcacgcctgcaatcccagcactttgggaggccgaggcgggtggatcacaaggtcaggagattgacaccatcctggctaacacagtgaaaccccgtctctactaaaaatacgaaaaattagccaggcatggtggtgggcgcctgtagtcccagctactcaggaagctgaggcaggagaatggcatgaacccaggaggcggagcttgcagtgagccgagatggcgccactgcactccagcctgggcaacagagggagactccgaaaaaaaaaacttttacagaggctttggatggctccagatcctggggctgaaacagtacatgggcagtgtactctcgttctcacccaataggacctgattagacttggagccccagatgtcacctggtggttggttgcttatgttacgcttgcctttcttccagagaatccttccatatgtccctccatcctctcctaaaaataaaaccatttggcctctactctagcatcattcacttgctacatatcttgaattgtgagttgtttttaaaacactgaactaaaatctgattcttctataatatcttcccatactcaaaattggaaacatctaaactctggaacctgagcatttctggttttgtcttgaaatgcctgctttacttccccacacttccaacggtgagcagctctgactctatgttagttctaaatgtattttttaaggcctatttatatgcagagtaggcattcagaatatgttcttatttctataaaggcaaaaggtatattttgaatcttgcttatatgtcacgttcaatttagcttttttttttaaacaaaacaaaacagtgttggtcaataaactcctaaaatagaaaatatttatttagagaacaaaatgactgtttttggatgaattatcctcacccttgcattaagtgacctttgcattgggagctttagattggctcttgctgaagaggaatgccttagtttagtccaatcaaaaactgctttcaagtttcaggaaaagaaagtaaacaacccttgataacttctctcctgtggcattttagtttggaagatacactgttcttctgaaaaacctatctaatgttgggggtgctttcttccttttaaattgttttaattaaatattcattatagaccgggcacggtggctcatgccacccagcattttgggaggccgaggcatgcggatcacctgaagtcaggagttcaagaccagcctggccaacatggtcaaaccctgtctctactaaaaatacaaaaaaaagttagctgggcatggtggcacatgcctgtaatcccagcgattcgagaggctgagacaggagaattgcttcaacccaggaggcggaggtttgcagtgagccgagactgagccactgtaccccagcctgggtgacagacgagactccatctcaaaaaatgtttgtattaattatatacagaatttataacattagtgttaggcatgcagctcaccaaacttaatgttgacttttctttcattttgcctctactttagagccttactcattgtcctgtcttctcttacaccttggagacatagatatgttgtaccagctattagcatatttttttcttgatctaagatctgtggcctagggttgctgcagtgctctataggaatgaggatccttcttattaccctgtaaatactttagttatttcaaactcttgagtgttacagaagctcttatccatggtacaacaatagcaagcacaaaaacctgtggtttctttcacattttcttagagcacattcatgcatgccaagagtcgtgagatgagctctccagaagcagactgagaagaggatttctgcacaagtggtttatcaaggcagggctcccaggagaaactagtgagtgggggaagggaagggaaagggaagaagccaagcagggagatgattcaagcaatgtgcctgccccagcctgatcctgggggcagagttggggggtgcagtgggccgctctggaacataattgctccctagagtctgttccacatcaaggcaatggagctgggcttttccactcctgcatcagtcactgactgtgggcaggtaagagagggctataaacttccaagcacctctgctgtcttcatctgcatgtgaagcagcttcggtggttgaagaaggtttttcttaagaaatgttggtaccatcccttagcagcaaagcacacaaaagccgggaaagggcacacaagacgattaaagggacccagtgttatctgggcaggacactagagtgtctgctttaccaatccacattccatcttcctccttgcctcactcctgcgggcacatttttaatccttagcccatttcctggtgtaggttaagcactttcagaggctgcataggattatttttcctcctctgagaatggagtcagctactggttcaaagagctaagtcctaaagtaattgcagtgttgggagacacctaggtaattttcagtgagtagaatttctacatatattagagttttagaaatagaaaacttgacatttcaaagctttccttagtaaaatcatggataatgatttcagtgccctgaaagaagaggtgaggatgtcatgtgattgtatgattggagattattcttactaggaacatttccaggcacacaggttaacttcattattcttcattctcatctcttttagccatcctttattttatttcctaatagttcacctttgcctttggaagtattttcttttcataagcttttaagggaaatatatagtgtttcttgggcaccttctatttatttattttattttgttttattttattttattttattttattttattttattttattttattttattttattttattttattttattttgacagggtctggttctgttgcctaggctggagtgcagtggcttgacatagctcactgcaccctggaactcctgggctcaagttatcctcctgcctcaacctcctaagaggctgggactacaagtatgcactaccatacctggctaatttgtaaaattttttttgtagagatggggtctagctatgttgacgaggctggtttggagttcctgacctcaagtgatccttccaacttagcctttcaaagcgccaggatgacaggcatgagctactgtgcccagccctcttgggtgccttcgattcagtacagcacaaaatttcatgattgttcacctgatgtcctagaccagccaacactgtccaatagaaatattacgtgaacaacatagaacattttgaattttcttgtagcttcattaagacagcgaaaagaaagaggttacagcagcctaaactggaggctggaatgtccaaaatcacaggtgaaattaattttagttacatatttaacttagcatatccaaataattatttcaacatttaatcaatgtaaacattatggaggttttacctttttttgtccactgaatattttgtacttaaaacggctttcaagactagccatatttcagtgctcaaaagcaacatttggctcgtggtaccatattggccagtgcaactttagaatattatagagaaactctggtaaaaggccttattctgtttgaataagactcttagtcagtgcttctgaatctcccagcttggtaacactactcagtaaggaaatgaggcagcaccgtggtccagagagagtgagctgatctgtccttgaggtgctattgctacttccatttttggatttagtgccctgttgtacatgaattaggattaaaacatttaggtttggcagctcagatgtcactgataaccttcaaaggtcacttagaagatagtgggccttgaatggagggtagaaagtagaaaaattttaaagaggaaagggagggaatttcaatgggaaaaaaatctatatatgtatatcgtgtgttttgggggaggattctagaaaagtttgggtataatacttttatgcaaactcatggggctggagtgttacatatacaatgagaaaggtatagttagtggccaaactgataccagactcaaagagtcgaattttgcagtacatgaaatgagatatcaccatgatatagtatatacgttgggacctattctggttatttattgttgtgtaagaagtcacttgaagatatagtggctgcaaacaacagcagtcacctttttacctctcagtttttctgtggtcaggagttagggaagggcccggctgtgcatttctggcttgagttctttcatgcagttgcagtcaggtggcagctgacgctggaagagcaggcagctggtatggctcagcgtttcttcctcctcacccagtctcatgtggtcttttctatgtggtctctcttcatgggcagctttattctcatagcatggcagcttcagagcagggggacagcctgcctgggcttcagtgtgattattctgtccaaccaggtggaagcagcattgctttatgacttggccttggaagtcatgcatggtcacgtctatcacattacagtagtcctctcttatctgtaggggttacgtcccaagacccgcagtagatgcttgaaactgtgttaagtactgaattttatatatgttacatttcttctatctgataatcaagataactactagtggccaatgagtgggtagctagagtgtacagcatggataagctagacaaaaggatgcttctggatgtgagagattgcattgtgttcctcagaatgggatacaatttaaagcttatgaattatctcgggaattttccatttcgtacttttggactgtggttgaccttgggtacctgaaatcatggaaagcaaaatggcgtctgcccagtttcaaagggaagagacttatgagttcaactctcagagacaggagtgttgaagtcacaatgtgcgaagataatattgcaactatttttgggcaatatcatctgcctcagggaccctctccattgccactcctgtacccatcttgctctcttgagctgtgctctgggagcgctgtggtatgagcacagctttcattcccgggcacccttctatacagtggctctctcttctctccttacccagtaagctggactggacagtccttaacaaaatgtgaagtcttctgcttaggcactaaatggccaaccctggccctctgtttatttttcattatcttccttctttattgttagaggccttcccaagcagtgggcaaacaccaaccccagctgttctcctctcattttttaatttgtggagcaattgagagagaggagagagaaagagcaaaaacaaaaaggaggaagaattttctaaccccttactggtcttactgaaaagacttgtcttaccttttccacctaaggatgtcatctccagaagacagaattcttcggtttggccaactgccaggtttttctcaccatctttccatttctaggttgattctcctttgctctgtctcttgctgtccctggccaactgggtttctcttcccaaggtgattagaaggaaaggggaaaagcatggggccaacaccatgacctttgagagagaactttcctaacagttgctaagctcaacattctaccaaatactgttcgccctggttttcataggaaaatccctctcctttgccacaatctcatctttacctcaacatgggctctgaaactaggtgcatagtgagcattgacttgctttcttttccctcctttcttttgtgaagtcatactttcaactggaaaagattgaaatgccagctgtgtaagagtttaggtgaagcatgctgagttctgcaacttatttactatgaaatggattaaaaaatgctgatggatggatagaccgatgaatgaagggctagatattcaaaaaagctagtagcataaagtgttcattgtagaatctagctggtaagtatatgggtatactacccatatatatcacatagtatatacttacgctgtataaatatacataatattaatttttttcaactttgtaaaagaaaaagttagagaagagaagcattaaccataaattatagtagtgggatacatttgaaaacaaaatgttcatttcctacttaacaaatgcttaaggcttgtcttggttttcaggtgaactttttaaaaggttgtattagcattgttaattgttctaccttcagtttaccttcaaggtttaagggacctggaaaagatgtaacagtcgagtctagaaaaatagtctaaaattctagccgttgcccttagattttgtagtttctttgagcttgtcacatattgcttgtgagtatgctattgaagtcattgtattacggttgtttttctgtgtcatttcctgagggcctttgtggtggcaatagtaagaacttattccaaagataggatttcttgtttcctcacctgttccacacactcccatgttaaattgggcattctgaatcttttccagaactgaaatatggattttttcccctgcattgggcatgtttgctttgttttatctgcttctataagagagagggaacaatataaatccagttcagctccctggattattttttgatatatcaataaaatgtttaaagttattggaaattgttgcatttgaaaagttcttaactattttacttttctgaaatgaaaagaagagcaggcatcttgtctttgctgtcctcaggtgggaaagggcagcttgctgaggactgaagactaaaataaaccctcccaggagaggaaccggccggtgaccttggctgcaaccaccttgcagatcagctgcttcattcctttccatattttgtggcctgtggggggaatcaagtgtcacaaaagcaggaagagagcagtttgaggaagactccagaggcactgctggtaaaagtgctgacgtgatctcctgaccctttccgtatggctggaggactggtggttttatagtgaccattcaggtagctgggaggaggcaatcctcctgtgaaaaataagctgtaagaaactgttgcaacagttgtgtttttttatactcctcatgtaataataaagcggtctagaatttggatagatgccgttacatttttgcattggaggtatgttaaagagcccatactgagctaatagaaaaatagaagttaactcactcttctgagcaagtagaagtttattgaaaaactgaatgattttggtgatttttaaatttgtcacctggctggatacatcacagtgtggtgggaagaatgtgagctctgaaacctgggacctgggttgtcccatctgtaaaatgagcacagtattacctttttcattggttttggaagtattgacagggagatggtgaatctataggacttttcttattgcagatactgagaatcttcgtccccattttccttcctttcctatagatgctgatattataaaacaagattttcatgaggctcagaactaatttctaatgaattcacttattcctcctcttctgtgggcttctgctctttcttctgtacaagtagaaaggaattaagagtctgcaaggcaccgatgttgaggagctcactgtatcacattattctcattttgggacccttttcctacctaatagtgctctgtccctgggactttacacagtgacatttctgtggattctaatcattttaccttcccattagcaacagcaagtgttctgatttctttccatcctcaccaacactaattttttgttttttttgtttgttttttttaaattagagctttcttagtaggtatgaaatggtacctccttgtggttttgctttatattccctaatgactgatgctattgttcaccttttcacttgcttgctgatcatttatacctcttctctgccctttgcccattttttaagtgggttgtctgcttttttgatgttgttgaattcattgtaagactttttttttttatatgtactgggcacttgatccttttcagatatatgacttgaagatattttctcccattctgtagactgtcttttcattttcttgataacatcttttgatacacaaaagtttttaatttgacagtcaaatgtatctattttttctttttttcccacttttcttgtcatatgttagatcccttcatattttgttgttatatttaagaatccaagtttatgaagaattaccctaagatttacaccctgtgttttcttctatcagttttatgatttttagcccttatatttaagtcatagagccatcctgaatatgatgtgaggtaggggtctaatttcattaattcgcatgtagatatccagttgccccagcaccatttattgaagaaactattctttccaagattgaatcatcttggcacccttgtcaggagtctattggctgtagatttgtgggtttatttcttgattctaaattccattgcattgttctgtatgcctatacttatgtcactgacacactgtttttattactgtgtcttttgtagtaagttttgaattcaggaaatgtgagtcctctagctttgttctttcccattattattttggctacttggggggctcctcttgaaggaagagttttattttataaataaaaatgtaatacttttattattgttttgtcctgcagtgatttttcaactatggtattatagctcaggagaaagcaactccagtaaataatcatgtgattgcatatggggttattataggcatgctacaatccaagggcttcttttgcttaaagttttacattctagaagccctggaaaccttgatgagaactacatcagtggtattcaaagcaaagccagcgcacagactgctaagttaaagctgcttgttagaattccaaggggccatattccagcagccttttggaaaagagcaaatgtatgagcttctcatttgcagtgataactagacactgtcctgatttatgcatatgtttgcctgtactagttattgccttcaattatagaagcaattttgaaaacaactttctcttatgtaaaagaaagctgtgatacaggcatcaaaatcaggaaaaaaatcagaattgtgatgagagagagtaaggaagaaggcaggtgattttcctgggataagtcacatttgtttccagtatgtttgacctctagaccattcctttttgagtagaggagactatgtaggattttccttttggaaagaacttttgtctgtggatccttagcaactactctttaagcacttccagatggtctttaaagtcctcatctaatggaagctgagagattgttcctgggggttagggggtggatagaaaagggctttaactactggataccttgacaatgggaagctataagaaggagacacatgtatttttcagctgaccctcatcaaaatacaattagaagtaggtacatatgtgtgtttatgtgtatatgtgtgtttatgtgtatatgtattagacactgctgagcctagagcactgagtgaaacacttcagtaactataatgggagaacttcttggattagacaaactaaaggaggaagaaagaaatgggctagggcagaaggcccagggccatcttcatgggtagagaaggttgacttctgggcccatgcagaacctcctaaagctgagatggagagaatgctgagaagcagattcctaagaggcagctgatatcaacaggcctgactcgggccagccagaactcaccactaggtccttggtcttcatggtttggcaggagcttttggcatcgctgtgaggataacattctcatctggtgcaaacaacaaaataaaacaaaccccatgctcttagagagtgcctaagacattgtgagagtttaataaatgatagctattatttttgtttaatatacaaaaagagtggttcttaaaggtcatcccataaagcagccttttttaaggatctccagaggaagtgtggactacagtctcctgtctgattcatccactgtgagagtttatttccctacgggcgtggaaggactagcaacactaaaatctcattaaacgggtacagaatgaagctgctttcagtggatgtgtgctttcagatctatcacaagtgtgagtagttgtcattttttagccactaaaattgattcagaaattctgcaaacaaaggaaggattttaggatgcagtgcagccagaagaaggccacatgtctcctgcttgtgctcagtgcctttcatggaggttattgtgcagtatggaaggtcagtaaccaaagtgcatgctgcagggagaaataccaaactgtcaacagggattccctttcaaggttccattggagttggaagttttacctctttattttatgttttctcaagatgtggtgaacttattttttttttatttggtaccttttaatacatctaaaaacagtttttacaacaaatctgggttctttgtgtttaaaacttttttccttcaaattttaagttcaggggcatatgtgcaggatgtgcaggtctgttacataggtaaacatgtgccatggtggtttgctgcacaagtcatcccatcacctagatattaagcccagcatccacgagctatccttcctgatgctctccctccccctacttcctgccctctaacattttttttgaaggttaaaaaggaattatcagagtgattatcagggaaaaaagctgggaaatgtattacactttttttttccactggtaatgaaaatgaactaggactgataacaaaataccatagactggatggcctaaacccacagttctggaggccagaagtccaagatcaaggtgttggcaggtatagtttcttctgtggcctttctccttggcttgcagatggctgctttctttctttgtcctcacatggtgtttgctgtgtacactcacattcctgatgcctctttttgtgtccaaatttccttttcttataaaaacaccaatcacactggatttgggcccaccccaacagccttattctaacttaataacctctttaaagatacagccaaatacaaatacaatcatgttctgaggtacttgggggttaaggcttcaacatatgaaatttgagggcagtgggggataaaattttgtccataataagcagtataggggtaaaggagaacataggtaaagcaggaactaagaaccagaaaagtgggtcaaagttcagggccatgaagttaagaaaaagttttaggaggggaatctgtagactgaaaatggcaaagaaaggatttccctgactgaccagtgtctcagttggctttcacaaaataacaaactaccctcaaaatttagtggcttaaaacagtagcccctcatttaactcacaattcactgggtcagcaatttgggctggccttgattgggaagttcttttggtctccattgggctctcttatgggtctctgttcaactgccaagtatgctgagggctgggtggtgtagggtggtcttagctggcatggctcatttcttctccatgtgtctcttgctttcctgcagagtagtttgggcttgttcacatgacagcagcaaagtacccagagtacgagagcaaaaccatgccataatttctgccacaattctattggccaaggcaagtcacaggccagcccagagattcaagaggtgaggaaatagacctttttaggtgatggctttaggagacaaggattatttgactgtcaaagtcccatggcctattatattttatattaataacagactttgcttatattcatgtatcagagaataataacctggaaaggaattacaagcgtatttatttatgggtggtacttctgtattcccaaatttggagacatagtttaatcagagcatttcttaacaacgttggttggcttttattttcctgtgttgctttgtcatccagaacactgggagagatcctaggagaactctgggtgatagtttccattttcagaagtctgggtgatagttcccttttcttcccatatcttactttgaatgaagcctccatggatgaggtagcccaggggaaacctccagctattatcttgtggggttaggtcgtatgaagctcttacaggagaactgggtctttagggtgttgtgtaggggggtaacttaggaaaattcagccataacaccttatacaggagattatgctgcatataaaccctcttggagagagctgccaccttcttgctgtattcactagtccttggtatccacatggggctctgttaagggagcccccccatctaattagttcaggtgttatataaaacatgatgtatatagcagtgctccttagcctcgttgtgggatagtgcaccgaatttctatggagatggggaagaacatattagcattttatagggcagagagaggaaacttgtgtgtagagtctgaaaatttcagtattaaagttttatatttggaaagcaatcataaaattttcagtacatttacataaaaaacatcttggcagattcttatatagttaaacatatactaaccatatgactccagcaattttacttctaggttttgtttcccaagagaatgaaaacttacatccacacaaagactcgtaaacgtatgttcatagcagctttagtcataatagcaaaaactggaaacaaccaattatccgccaacaggtgatggataaaaaagttatgatgtgtgcatgccatggagtactgcttagcaataaaaaagcaataggtcattgatacaaacaacaagttggatgaacctaaaaaacattctgctgggtgaaagaggcacctcacaaaataataaatgctgggtcatttaatttatagaatgttctagaaaaggcagatctaatccatagtgatagaaagcagatcagtggttgcttacatctggcatgtgtgtattgaaggagggtgatgacaaaagagtccaaagaaacttttgggttgatggacaggcctctaatatcttgattgtgatgccagttagcatagatacattttattgcatatagcacataccttaataagtttggcaatttgggaggaattgcctatgtttcttgtaatgcaaggcatcattaccctagaacaatataaaatctttatgatcatcaaaagggaacatgggtttgattaaagattaaagctttgatctacctttagtttagggattattcatttgtctctaaattgtctattgttgaaaacagtgggcaggaataaacaagaaaaccattcagagtctcatcatattatatacctggctcctgtgactaagccaatatcttctaaattaaaaccaaattttaggaattcttcaacagaagtatggaaacttcacttatttagttgaattatggtagctacagctgggtaaagtttgtaggtaattttcaacatttgatgcagtgcaaaggactaaagatcaggtttatggtttatagatcatatgtttatgtcaatcaaatattatttctttgatgaaaactgagtggtacaagtgggtaaatttttgtgtatgctatgtgagttctggaagagacaaaagtaaataagaacaggagaaaaatagtcccttagaattatcaaaatcctattttggctgttcagtctccgatagtttaaaagataaagctgagagaaaaaatatgattgtaatatgtttatttgggttgaatgcttgatgtaacttaggaagagaaacttctttgcttttagcatcaaagagtttattagttcccagatgtcattcattccccagagtgctagagacagtgatttatattgtcaaaggctgacaatgccaaaatggaagcagattttgttttacttcttaagccaaatcatagtctagttgaaattactcaaatgtatctcattttagtttcattttgataatccaaaaatgagtttcagatttcatcttctaaatgttttaatgttaaatgataatgataatgacctaaaaaaattttatgtttccgtcctcattagtgtttgctaaatagtcacttttttgtaattttttttctgtcatttgttcattcatttagcaaatatttattgagtgtctaccatgcaccaagcactgttctaagcacttggaagagagcaatgtacaaagacacatccctgatctcataaaggaacattttctaatagagggaaatagataataaaaagaagtaaacacgtgaaagaacaggataatttcatgtagtgataaacattaagaaaataaaaggaagtggtatggtagaggctatggtaggataggtgattcatttggatttatggtcaaagaagattgtactatgaaggtaatgtttgagcttagatccaaatgatgagaaagagccaggaatgtgaactaagagtaccactttctagatggaggcaaaagcaagtaagtttgcttgtaaataaggttgcaagtaagtttgagaagaacttatgtttaactaacagtggccagtggggagcaagtggtagattaagtcagaggggtagacagcagttagatgcatgatcacctttagaccttcgtaggaaggagtttttaaaattgttgatgtttcttgtttgttgtttgtttgttttaaatggaatgggaatttatcgataggcatgctctgatttctattttagaaaatcactgctgcagtggaaaatgaattgggagtgtacagttggggataaactggaagcagaaaagccagttaggtagctattggattaacacaagagtaaaggcttatacctaagtgctggaggtggtgacgtagagaaaataagcaagtttgggaactattttcaaggcacttcagcagcagatgagttggatacagatggtaaggtgaataaaaaaaggcactgaggatgactcccagggtgccagattgaacaataggtaggaaatttactgagatggaaaagactagaggaaaaatatggataaaaaatcaaatgttctgctttaaactttaaagctttgtatgcttattgagtgtttgagtgtaaatggcaagtaagcagttggatatatgagtctggagcagtcagatccatgagagctggggatgcagaagtgattaatggaaatagagacagcctctaaagctttggggccatctgtgatcacctaggaagagaaaatacatagaggtgggtcactcaaacatgtagaggttaagcaaaccaaaaaagatcaggattgtggacaagtggtgggtgaggtcaggaaaaacttggagattgtagaatcactgtcactaagaaagagaatgtttcaaataagagagagtagttcattgggtcaaatgctgtcaagatgattgatggagtcagaaaagtgatggttgaatttcaaaacctggagatcattgaggaccttgacgagaggaaagaagaattgtaattcgactggcctgaggaaaaaggaaggtaaggaactgaaattttcataggttgacacttgtaagatgttggattgggggtaattttatcattgagaaagggcataggaaaaagaggctggttctttgaggttactatatgatataatcattttagagagtggaaatgtaaatacccaaagaagggttactggacaatgcttgagtgttcatttgagatttgtcctcatgcatttaaagtaaagaccagtttgtttggccatcagttttctccagccaaactccattactgcagttgcttagtagagaatgaagtgtaaccatgtttggggaattaacaaagcaagtattctggaaagagaatgaggcaagggagtgaagagtggttgtaagatgtgatggacaatggaatataggatgggtaagaaggaaagggacacctaaggactgtgatggataatgaaagtgtggtagggtcagtggagtgtaggcctcagattggtcattgatggacttggagttctaatagagaagaggacaatcattgggcagggaaggggtgcttgcatctgattttgaaaggaagtacagttgctggtgatgatgatgtcaagcaaatgcacatagacatggctgactgaagttgaatggacaaatacacaattggaagttaaaaagtcaagggtgttgacctcacctgtgctcctgttaggccataaatgttaaaatgtattgatccatagtattatagaaaaatgtataatagtgtctgtttcctttgactgtagttgatgtaaactgactctttttctgtagtggacaacaaactatacatattgtagcctcaggcattcagaaagactggtctctttccaaatcccgctttcaaaaatctcagagaagacaatgactcgctcagcattgattgtgaggcctctgcaggagcagtcagctctgactggcagaattctcagatgtagaagtgggttgttgggcagataatcctgtaaatgccccttgcagacaccagctggtttacatcaggaagtgagtaagaaatgcttgggcaagacacacttcatgaaccaactcttattgaagagggatgaatgtaatttaagctccacagtcattgtttttggcatcttcacgagtggtctggattttgttattaacttacctttccggtttagctcagcaggaaacttagcaggctgtgattgtctttatctattccaggccagatatctttgttgcctagatgccttggcttgtctgtgatttgtttgtttataagagttgtgcaaatcataaggggatagcttattggatattcagaaagtgaatgagcccaggtaacctgataaagaaacaggacattcccaatatgcgggatcccccttcagggctttccatggtcaccatcccttccctaagcgtaatctctttcttgactttttataccttagattaattttgtctcttgatgtcttgatgtttgtacaggaaaatctgcttatggtaagcaggtactctggcacagataaaaccaagaatgtttaagtgacctataggttagtgcttcctccaaggcctgaaatccttgctgttctccacccctccaaccctgccaaccgccgccttccagaacaaggaagaataaccttatagcataaagaactactttaccttcaaagtctgctggtaattatgtaatgatataaattgataggacacaagatcttttcaggcttttccttttgtgtgcgtgtgtttttttgcaaatacgactctctggaacattcatatcaagagtcctgcagagaagagcctacttagactgagcctaattgcacaaggcagtgtctaatctttcgtgtgtgtgtctgtagtggagacctctctcctgataatggtaacagatgctgatttttaagtgctgtctgtccttctgcaacagatcagtgctgggagatgtcagacaccaaggcagagctttcctggactcattttggattgatgggagaggcacttatttcagacaagcggtagcattctacgtgagtttctatggaaactaacaatgtcagatgagatcaacagctgaatgctatttaatccaaaggcagcttaggttatgtgattttggataaaagttgtcctgtaagaaacaaaggaaaagatcatttctttcatgggaacagacaactgaaatatgatttatttacccagccacatacagattactcttgttatgtgttgaacacataggacatcatgacacctatgtgataggttttattctaataacttatctaaatgataccttcatgatactgtgtcacagaaatacagattgtggaataatgtgacattctcccacaggtcttaagagagaatgaatgaaaaaaaagacggcttttctgtattatactttatttttcctcacttttctttactgttttatttattgtggtataattcacatgtgggaaaatgtacaaatcctaggtcaagacttttcatatgtaggatacccatatcaccacttctcagatcaggatgtgtgtgtgtgcatacgtatgtttaaacgactatatgcttgtcacacacatccacatcccccaacccacacccccatatatcctaatctttattagctgcagcatgagataaccaaagtgaagttattggaggaaaggtgggtgatgaagattagattaaagcagcaatggccctgaatgaaacgctaaggagtttggactttttctagtaggagcttgctcctcaaggtattgtccaaggaccagcagcatcactgaggagcttgttagagatgccagatcttgggctccacctgatctactgcctccgactctctgggatgaggctcagccatctgtgttttcacaaacttgccagggatttctgtgcacactcaagtttgagaagcatgacagtagaccacagatcctgagaacataaaccagtagtgctaccaaagtttgcacaagaaaagaggaattttaagtggtgttaatagatactttgcacagaagtgaaatgctgaactaaacacagttagacacttttctttaccatgacattctcagaacccagagtatcctgatatagattgtgaatcccctaaagggagttatagtggaatctttttttttctttcttagtattttttataagaaccaagggaggaattaatattgcttggaactttggagacacatcatggtgggcagtgacaaggcagagaaagcttttcattaggagaggaatggagtagcatgatgaaagcagtgctctgcgaataatcacgtagaggcatgcaggtttagaagactggcctggttagggatagggactgcgaaagaaggaaatgattaacttggacaccactggggaggctctggagttttccagagcagctggaaagagagttctgagcagctggattagaatggtgattctgagaagtatggaggtatggctgttgtaggaagaactaggtgcctatggatatagtgccagcatatactgttttaacattgaactctgaaggagttctgttgtcacttcaatacaagcaaacatctcatggcccatgaacatggtttcggaaagaaatagtcctttgccaacagcctgaggttactgcctggtcagtgggtgcaggctgctgcacaggtgtgcactgtggaggaggaagtggagttgacccccccccgagggacaccttatccatatgtgggtgtcatccttcagcacagcaggaacactggtgaacagcatagcctttgatttccaaatccagtcttatcatttgagtcctttctgatatcacgctgtcaccaggcaaggccacctttctgggtggctgctgtgttgactgattttgatactgcaatacctgtgtctgtgattttccagagcataaaaggaaagtgggcattgttaacagttcctcatgactgaggcttttagtacaattttccatgctgtaaataaatgatgttactcaaagacaattaggttatatttgagaaactttctgatttgtatcaaaaagtaccctcctgtgcctctggatagccaattgggctggacctatgttgaataattattcagtttggaaagtataacattttagattttttaataagagtaatgtatgcacatgtaatgagatagatcaattcctgcatctccacttaattttttggaggcgatcactatagccgtttctgtttttaattcttatggtggtcattgctgtaatctaagttaaatcttcagtcttccagtactcagttgatcagttttaatattagctattgacttacttaatgaataaagatttatataaactacaatcttgattttttgatacttaccttactatttatagttctttctgtggcccgtgttagtttaaatagcatttttctgtatcttattcctctaacatttgaaggtctgtcttgactccttaccctgtaagatggtggtatttgctccactatcctctcttgaactttcttccttccactcccacttcttaacagtcctcttttacgttgtcaagtatccaagcattttctttgtcttattttttcatatcttacatcatgatagctttcccatgtcagtatagattgcattataaactggatttcaatggatatatcctgtaggggagaaaaagcagtatcttttccacacccatctcacagttcatggctgacccctataacaaagacagattagcaagagaaaaacgtaacaaatttatttaaccaaacctttctgtgatacaggagtctttggaaatgaatgcccaagtatccagggaaaactgtatttttgtggacagttgtgctcaagtatgattgaaggatggaagggtacgctatcatcgtatgtattagtcagggttctctagagggacagaactaacaggacagatgtatatataaaggggagtttattaaagagtattgactcacacagtcacaagatgaagtcccacagtaggccatctgcaagctgaggagcaaggaagccagtctgagtctcaaaacctcaaaagtagggaagctgacagtgcagtcttcagtctgtggccaaaggcctcagagcccccggcaaaccacagtgtcagtccaagagtccaaaagctgaagaacttggagtccagtgttcaagggcaggaagcatctagcacaggagaaagatgaaggctggaagactcgcaagtctgctcttccatcttctcttgcctgctttattctagctgcgctggcagctgattagatggtgcctgcccagattgagggtgggtctgcctctcccagtccactgactcaaatgttaatctcgtttggcaaaaccctcacagacacactgaggtacaatactttgcatccttcaatccagtcaagttgacactcagtattaaccatcacatagtaataaactggggtgaactcagcaaggcctatttgttcagattcttcttggtgtctgtacagaggagtagccctctggaatgagggtcttatgacctactttcaggggaggtaggccgaagaattttttttatgaccatgcttcaagggagagaaatgagagaggattagagagtgacctccaggtgccatattttggggtagtgtgttctgagcccaataatgatacctagtgttaagtaggtctcataatttttgtaactatattatttctctctgctcaccttctgcccagttttccctttcattctctctgtaaccatcgtatattgtaaataactttacaacttcagccttctagcctgtgaattttcctaactattattgtgttattgtgttctgtgctgtgtctgagcttgattttttcctgctattccctgcgccagctccaagccatgcccacttcagttccctctgggcatattctggtctgtagcattccctgccttggtctctgattgcacatttgtccttgcttttttgtctttatcttctattcttgtttgttcttgaccctttctcttctctttggttatctgtcagttctctttgttattccctttcatttgattggggggttgggaggatgagagggaaaggagagagggggagatgagtaacaaacacagaagttcagtccaacaaccctggccacttaggtaaaccgttgtctgctctgatggatcatggtacacaccagaactttgttactgcatttcctggtggtagcagagatctcaattgtttgatttgcagaaatcctatctaatacattgaatcagtcatatttcttcttcaattctctgtctccaatggtttagaaggaaagataagacctatggaaggaatatttaggctcagttttctttgaaatgtatgcaaaactggaagtaaatgaaaaattaatttgtggtgggtttaggtttattgcttaactacaaaggaaatgcttacttgaatgaaggcttctctgatttctttgttaccagtaatgattttatggctggggtaaatactgttacctttctcccctttctctatttatcttgcccatttacacacctcccttgtacttcctgctgtcagagaagctgaaatcagcaaatctgtctgtagatcattttcttttattcctctgatggcaaaatggtaacaacagaggcatgcatgcatacacacacacacacacacacacacacacactcactcactccaaaccacacaagagaaaccaatgaaccaaaagcagaatgggaaacaaaattggcaaagcataaaagaaaaggaaatgaaagaaatgtgataattgttgaccaacactgaatataattttccaagtcaggatacttgtgtgatgaatcaccagatgcattcaagattatgtctagagtagcaatggaaataggaggctttaagccaagggtataacctgcaggagccaaaataaggagagctccttccctagagagcaggtcatgggaaggcaggcaggagccttgacaaagtcagtagaatcagagaatggagctgaagcatgaccagaatgtcagcataatcaactctccagaaccttggtttatgacaataaacatttatttttggtcacaaattaatgggtcagctaggctttttttgctggtttggattaggctcatttgggcttactcatgcatctgtggtcagctagtgggtcagttgggggctggccaattttggatcacctctgttgggacaactcagctctgttccatgtggcctctcagcctctatcaggttagcctgggcttgtttgaggcatctgaacaaggttccaagagaaggagcagaagcatgcaaggccttgggaagtctacatttggaactgcaggtgcaggtgctgttttctcattctgttggccaaaacaagtcccaaggtgaaccgtagagtcagaatgggaagagatgtcaaagttacaggacaaaggccaagcatacagggaggttattaaatggaggcatcaaagcagtctgccgcaagctgggcagttattgagtcagattcatgggtatggtagactccccagtgctcgcagagtggaggaagttcagagaataaaacagaaagagtcattatgaagagatcagctttaaagaaggggatttgggatagaaaacctcacaggctccttcctaataacaaggggcaagttccttcagggcaaatgaaaacaaagggatggctcctttgtcccttgacaagcttgcctcagggtgataattcatgtgagcaataaaggggaccatttcatctgggggaatctaaccaatataagcaatggctggaccttcttaaatttaggcattttctgatttactaatagggttgagataaggggccctgaatgtccaatggacacagatgagactctcatgcccttctcttggcttaggctgtttagctggggattttacaggattggaggtgcctctttcttgtgctttaccctaaatcagggaattagagtagtggttttcaaagtgtggaccctggatgagcagtatccatgtcacctgacaacttgttagaaatgcagattctcaggctcaccccagacccatggaatcagaaactgtaggagtgggatctaggcatctgcgagttaacagccctccccaggtgatgttgatgcgtgctcaatttggaggcagctgaattagggttctgtgtggtattgatgggttcaaagcccatcaaagaagtggaatggatagatggatttagcaaataaaaaatacaggacatccagctatatttgaatttcagatcatcaacaagtaaattttttagtgtaagtatgttccatgtaatatttgggatgtacttttaatactaaaacattatttgttgttgatctgagaaccaaacataacccaatgttctgtattttacctggcagccttggaaagaggtatagaaaaactgcagaaagttcaaagaacatcaagattgttaatagaatagaaattctagagagaaaggttaaagaaattaacttgatgaacccagagagtacagcactggtgggattaataggttggaggattttatttaaagggaatgctgctgagctgttcttcatgaatgcccaaattaatcgagaagaaatttattttagaaaaaggcaagacttcctgccaataaatgacttcagtgggggttctgaatgattctgtgattctcaaaggaggtcagatccatttgggatttcatgggattgcatccagccaatactccaatttgtgtttgtgaaagagcagtttagagaggcatttgccaacaggaggttggagcaggtgatttctcaaggctcttgatgacttctctgtttgaagctgcaattttttgcatccttcttttttgaaaagcgcatagccttttgattatttttcaaatccgaatgtatctggaagtttggttttttaaaacgtggatataaaggggaggcagcaaagcagaggtgttaataggatgctttaaaaccagaccgcatggattcaaatcccagctgtgccacttcctagcctcctgcaacctttggttagtttgtgcctcaaatttctcatctgtaaaatgggaattattgtgaactactcattattatctcataggtaactgtgaggtttaattgagcttattcatgtaaaatataagaattgtgcctagaacatggttagccttcatgaaaagttattttatattattaaggactagagtctctttgtatatcctggacattcagaggttgttatggccagaagccattggtgaatggtcagtcctatgacatgtatggtagaagcattgtcccttgtgagcagtaatgtcctgtccctctccctgatccctaatcttgaggtgttggttaagcttagagtgatgttattctgtggtcgtattgctgcatcctaatcatgaatcatttctctttctctactcagatgaactttcccacattttctagaaacccccaagataattgggtttcatttcccattgcatgttgaattcaattaaaaagctgtaagagaataccatataatgtggctgagaatataatgacatttccaaaatattttttaaggaacttgaactctaaatcaatttagttctgctagtaaggacagagatttagtcatggaaaaatattaatctgatgactagtttttatcaaaattaaggatcaattatgactagttactttcagaaacttagttttggagatgaaaacaagtgatttgttttctgaactcctgcagggaacaaaaaaaaggtaatattggccccatacaatacataatttctgtctacgtgtgattgaagtgtcaaatgataaatcccaatcccctgttagaaacaacagtttagtcagtctgttcaggactttactgtatgtacttgatgatcagttaagtaaagagtgtttaggtggactttttttgttgttttgctgaaaagtttaagtttgttctttaaatgaagttcccttttgaatttgcaataaatagtaggcacccaattttgcagtgcttgaattctgatagtaaatagtgatggttgttatttttcttttattaaagaaaatgcagtataatgcctacatcatggcttaaaatattaagtatttagtcttcttcttgagtctgtgaacgctgggcagttctgagcaagtggaccaggcttgactgatctcagctatgctcatgtgtatgtctgtcagctgacatgttggctggtggctgtctgggcaagagcagccttctccttcacacctctgggagttggccagttgtaggttgaggatgggacaactgtgccatgtgccgcttatcatccagaaggctagcccagcctgttcatatggtggaggcaggagttcaggagttcaagagagacagagaaagagactggaagtaggcaaagtctcttgagagctaaactgggaattggcaccaagtcacttctgctgcattctgttggccaaaggaagtcccaaggtcagtccagaattttggggagtgaggaaatagattccacttcttgatgggaagaaccacagtatcacaagacaaaggtgtttgggggtaggccaaaaaagggctcacaaaatccatgtcaaatccctggaatctgtgaatgttaccttctatggcaaaagatgtgattaagttaaggattttgaggggaagagtttatcctggataaacagataggccctgccctaaatttagtcacatgcatctctacaaaagagaggcagaagaagtctgagtgagacccacaaagaggagagggtgatattaagatggaggcagagataggactgaagcaacctcaagccaaggaatgcttccaccagcagaagttggaagaggcaagaaatggagtctccccctagaacctctgtagggagtatggccatgccagcaccttggttttgtacttttggtctacagaaccaagaggcaataaatatctggtgggttttttttttttccagcctcccgagtagctgggactccaggcacatgccacatgtcctgctaatttttgtatttttagtaaagacagggtttcactatattggccaggctggtctcgaactcatgacctcgtgatccatccgcctcagcctcccaaagtgctaggattacaggtgtgagccacagcacacggccaatatctgctgtttttaagctgtctagttggtggtaatttgttaaagcagcccgagaaaactgatacaggtgtggatacagggagggataaagaattgaagacatttttgcaacaatctacatataccataaacttagataattttatatagctctttttcacttaatatgacaaaacatttattcatgttattacagtactgttaaacactattttgaataattgtataatacatactatatactgagttgatctagctgaacattttattgttattgacaattccttccatttttctgatgaagccctgtgcataaaaaaacataatctctatgctctgaatcaccattcagtttctcccttaccactatacataccttcaatggcaaaaaccacaattacttttgcaccaacctaatagttctgggaattgttataaccgccctgtgaatggtctcactctccctccagcagatgtacaaacccagctataccagatttgttttctgatgaaaaacacagttcaagttagctaaaaactttcaaagtttgctttcaaatattagttctttaatccaacacttaatactcctgtggtaatgttgtctaagtacaattgtcatatagcactttttttttttggtaaggctttggcatcttgaggacagcactgcttttttcaactttgtgtatcctaacatcgtctgccttggtgttttggaggtatgggtcactctgctatctgctgcatgatgagtgaataaaggagttaaaaaagggaaacatacttataattgtcttctcttgtcatatatgatcccagttattcaatatgactggatttgaactcgactgggtaaattgccttgttttagttgcttaggggagtcttaatattttcataccattgacccatttggcatctggagaagccttctcagaatagtgtttattaatacctagaacaaaacatataggattaccaaagaaatcagttgtattgcacaatagttcaaagtattatgaattgcaatatagtaactgtgtgcatctttatattaatacataaaataatatatagcattaggcctcttagttactattatttcaaagtagtgatgacagtacccagcatattaagatacttcaacatcataatgtgatattaagatatctgtgttttttattggtggcagaatcacagatctttttagtactactgtagtttgttgccaatgcccataattgaagaaaactctgcattttaatgagaggtagtataaatgaaattgtaactttgttttcattttagttcatgaattacctgaattctgtagaccgcaggttgagcacctgaaaagcttttttagaaatagctctagcctctgttttccccagttgtcatcacataagtttgattaaatattttgagtagtttatgaagttatgggtaggcaagacatttctgaacacttgcatgtataacatagcacctaagatattgtagacattatgtaaactctttttgaataaaaatacaaccctcttcaagtgcagatggaaaataaaaactcactcacttggacacatttctgttactaaccttcctgggtagttgttttgttaagtttagttgtttagttgaatcctttccctgttggtactaaattgataagttgcttgcatatagtgtagtctatgaataattctctttgatttttatttgttgagtttgttcccacttccaaaggggcttgaggtagattgggttctgaaacaaagtgcagaatagagcaattatgtaaacatagatttcctggaggtcctgaggaggcaggtgctccaggcacctggtgatctgatttccactcttgggcattgcactctggtctgatttctgtaggtggagataaaatgggaaacatttaatgcagcctccatttcctctcaatagaaattatacaaaaatattttttatttcttaaaaaacatttttctttcaaatttaaatagcctgtaatacctttcttcattttacaaagccccgacttacagcagcataatatttattaatagagttaagcagaatcaatgcatgtgtcctgtcacactgagaactgtagtattgtggacaatgtttctaatgtattgtgatcggttagctctcatgagaataagatgaatgtttatattacatatatattatatatctccatctatacccattactatatctgtgtatatatatgtatatatacgtatatacacataacatcgaaagtatgtgtatgtgtgtttatccatgtactgtgattaatactcatgtacaatgatgttcacttgaacgccagcatttttttatgtggttgatctttgcatttttctgtcttcaggccatctaaatcctctgactttgaggttttttgatttggttgaaactaataccaaaattggaaatcttttattacaccaggttaactcaaagagtttcttaatatgggataaagggatagtttgtaagattaggaataaatgtgataatcacttgaagttcctggagcatacatagtgttttgattattaattttggcatcgcttaaacatgttagaaataaaaagggccagcagccttttgtgtcagattaacttagtaaaaattacataaagagtttgcattatttatttctgttttctgtttcattgagtggaaaatttaaatctgacctactgactcttttaacacactgagaactatgtatttatttctaatttattgagtgtcagaaatatgtcttcaaattccctaaggctcaacttcaaggcaggttcctttatgaggttttctctcatcccctgcattaatttcctattgttgctctagaaaatcctcacaaatttagtgacttaaaacaacacaagtttattttcttataattctggaagtcagaagtccaaaatcactgggctaaaatcaagggctaaaatcaaggggctggcagagctgctttcctttctgggggctcctgagggggaccctttccttccatttccagcttctagcagttgcctgctttccttggcgtgtagctcccttctatcttcaaaaccatcaagtctttcttacaatgtcatctctctgtttcttactcttactcttcctttccccctgtttaaggacttttgtacctttgtgattccattgagtccacgtggataatctgggataatctctttattttaaggtcagttgattcagttgattagcattttaatgccagcttttttttttaattttattattattatactttaagttttagggtacatgtgcacaacacgcaggtttgttacgtatgtatacatgtgccatgttggtgtgctgcacccatttttgagacaaggtatctctctgtcgcctaggctggtgtgtagtggcacaatcacaggtcactgtggcctctaactcctgggctcaagggatcttcccacctcagcctcccaagtagctgggacatcaggtgtgtgccaccatgcccaactaatttttatttttttaaattttctgtagagacagggccttgctatgttgcccaggctggtctcgagctcctggcttcaagcgtcagtctcccaaagtgttgagattacaggcatgagccaccatgcctggcctcttaatgccatttttcatcttaattctcctttgtgatataacctaacatagtcacaggctctgggcattaggaaatggctgtctttagggaggtatcattctgcctatcacatcccctaaaccagaaatgatctatgtgtctttcataaggtgttagggaaacactatctcaacgtgctattattcacgtgcatgctttatctctcctttataatttaacctatgggaaagacaggaccctgtctatattatatttatgttctcctcagtatatagcaacactgaaagaaccaggtaaatattttttgagcaaatgaatgattctgtatccaaggaatgcattagttataagggagagaggtcagctatagaaagagagaaaaagaaaaaaggcagaaattgacagactattatcagcactactcataagagaatagtgtcttcatatgcaccattgcctctaagcagcaaataatttaacttgttaaagttatgatccacttaagagttatcctattctgtctcactataaatcagtattttggcacaaaaaaatccttcagccttgtgttggcttactaagaataagttccttgaagccttgcaagctctgggcatcctacctttatgaaagtgacggacacactctgtgatggatgccctgtgcagagagacctattgggtagccagcctgcacctgtcaggtggtacccacaaaccttccttaaactctgtgagctttacagcattaaaacacttctaaacacatgcagcttttctatgaagcactcttaagaacaaaggacagtgaatgaattcccctaagatgttcagaaagccaagatttcccccaagtattaccttaagactgcatatgagttatatattttactcccatgatgcatttgtatagttctaaatacataaaaattgtttgtttgttacacatccaggaagtgtccttttgagatgtgtgagcacatattcttaccatagttctgtaacgtaggcaggcattatttgcctgtcttgcaggtgagggattcaactcacagaatggaagtggcatgcccatcatcacatatctggtatgtgatgtgtgcaacacagtgagtaatgaatctagattacttcacctcaaactccatgcttattacacatttagtacctcacaaactacatctcatgtggcatcatgatttgtaggccatcaggtgttctgttaacttatgaactgaataatgcagcattttctaaaatgtgttccatgtcacattactccagtaatattctctgtgaagagttttgtaatcaacaatactttcagaattaaagagtgtgttagtatagtagtgactatgcatgtccaacagagaaatgtgttttaactttgtttttaccccagtgtcttccaaactgatatagccacagaacccttgctttctgccctcttgctattatctgttgggcaagggacaaatttctaggtcctggatccccagttgctcagtcatgattatgcatccagccatggtgtgcaaattgagctgttgttaatgggcaaaggttggctttgccacctggttttgttaggagagctttcaacagcaagaactagaatacctaagtcattttgtttgagcccttgctaatgaaagtgtggtcctcatatcggctgcatagatgtcacctgggagcttattagaaatttaggatttcagtccccatccttgattttgtgaaagggaatctgcatttgaacaaaatctccaggtaattcatatgtagtgtaacatttaaaaagcactgattttaaccataagaacaattattttttatctaacaagaaatactgaggtgaagcgttctattttattggcaactcggtagtggcatcaaggacctggatgcttgtctcctcatggtggtaaaatggctgccaaagctccatacgttatctcttcccccagctgcatttaatttcaggatggaaagaggcagaggcaaaggactttgttcttatgtggctccctttttttactaacttcttgctcagaaggtcacttgcagccttccccttagttcttacccattagatggattactggcaataataaatgactggcaataataaagacctcaattccctttgatcttgaccaatgttgtttaaaaaatacataatgctagccacatacataatttaacatttcctaatggccatattttttgagaaagcaaaaagaaaacaggttaattttaattatatattttattaaccaatatattcatactattatcatttccacatgtacccaatatataaaaattgtcagcgagatattttataatctgtttcttcaaagtctttgaaattaagtctgtattttatgcctatagcacgtctcaattcagatactaaatgttcatcagatattcttgatctgtatttagatctcataaaagtcacaattaaaagtgttcataaacctaagttgttccatgtaataattaaccagtaaccaaatcagtagcagattttaaatgtaaatgcaaattaataaaaattaaaataaattgaaaactgggtccatcacatttcacatgttcggtagccacatgtggctagtagctatcatatgagacactgcaagtataggtcctcactactcaaagtgtggtccaaggaccagcaatgtcagcatcatctgcgagcttgttagaactgctaaatcttgggtcctatgctagagctacgaaatcaaaatttacattttattttaatgcatattaaagtttgagaaattctagtctaagctgttctcaatcttggctctaatttagatttaatgtgggaactttagaaaatactgttgcctgcaccctatcccagaaccttggaatcagactttctgtagtggggtacaggcattcatttttttaattgaagctttctaggttattctaggatgcagctgtgatggtaaattttatatgtcaacttgactgggctaagggatatcagatagctagtaaaatattctgcatatgtcaatgaggatgtttcaggaagaaattagtaaagaagattgccctcatcaatggagctgggcttcatcatccagtctggggaagggctgaatagaacagaaaagcagaggaagggtgtgaatttgctctctctgcttgagctgagacatccatttcctcctgtctttggatcctgaagctcctggttctcaggcctttgcacttagattggtacctacacaaccttggcttccctcgtttttaggccttctggtttagacaggagtgacaccactggctttcatgggcctccacttacagacagaagattgtgggacttctcagcctccgtgatcatgtgagccaatcagtctcttgtaatacatctgtctgtgtctctctgcatatcctttcattctgtttctctggaaagccctggtaaatgcagctgctaagtttgagaaccactagcctagactaatcctgatccatcatctccaatcagacacactgtagcctaagcagtactatggtagaagctctcgggtgagtaaccaactgtgacttccccactgggttttgcttccctctggcctgtgcacatttccagcagagcaagggatccgactagaatcagctatacttgctggagttgcacattcttggtctttgtccattcactcactggctaactccttcctctccttgcctgtcagcagtttcctcattcttcaccttcctcgttctccaggtagcaaacaaggtagggctcctgctctgtgctgatacctactcagacccaatctggaaggccatcagtgactgccagtttctttcagctcctcatccccactcttgccccagtgaaaatgggtttcccttccctgttgccctgttcccgtctctttttccacttctagatggcatcttgcacacttccagtctttgtttccttcaggtgctcataattctgcagtcattttgcttattatgttttgcctctttgttgatgataagctcaaatgaggtatgcataaagtctgttcatagaaagcagctctgaatctgtgaggccaaacttagatgtgatttaatgaccatatttgggtacactggaagctgcccatgttcacttcccaggtttcctgaagatttagaaggtgcacatacctcaaaacataggcttgcaaatttacgtgcctctattgccagctggatctgctgggtttctctttggagaagggaattttagcaggacacacatgaaaaaataagtgctcctctgttaggaatcttcaactgagaaggtgccatcagtgcaaacaaagccatgttagagcaaaagtatgtttggtctgcccagctctaatagatgatgttcatgtcccttgggctcaagaacaaaggaactgcctgacagtcttttgaaatctcacctgtttcttggtagagaagcttctgtgcagtatacatttccatgataagtaactgctgtcaaatctaataagaagactaatctaaaatttaggctgtataaaagttaggctgtgtaataaataaaataaccggattatattaaaaaataactgtttttatttgaagactgagcacttggagaaatataggagttagccaacaaaatcaattcttcagcttacatttgaaaatgaagttcctgttttaagtgtataaatcctatgataaaaatgtctcagcctagaaaatgcaatttttgaaatgtaaagttttgatgtaggattaaaaatgttattgtcttggccgggcgtggtggctcatgcctgtaaccccagcacttcgggaggccaaggcaggtggaccacttgaggcccctaggagttcgagaccagcctgggcaacatggtgaaactctgtctctactaaaaatacaaaagttagccaggcttggtgttgcatgcctgtaatcccagcttcttcggaggctgagacacaggaatctcttgaatctgggagttggaggttgcagtgagctgagatcgtgccactgtactccagtctgggcaacggagcaaaactctgtctcaaaaaataaaaataaaaaaaattgtcttatcacatttacataattattctctaatatttatattgcaataaaaatgaatctggtaaaattcccttgaaatgtggggatgtttattgcaaatggtccaatggcttttcggagaagctccttgagaaatatccatatgattcaaattatgtgcagaacagcaaagtagtaaaagtatactatcaactttctagtattagaattaagaaatgtcaagaagaaccacctcaaattttggaaggccagagaaattttgattcttctgcaatcactctagtcagtaaaagagataaaccaaataataataataaatacacatatctagtaaaatatatatttatacctgctcatatagtgaagtatatctaatttatccaatactatagataagacatggatgtgttgtaccttgccctgttaatggtgcgctcaccaataatctcatcatcctctatggccctaggcagagttcctaatacttttgtttcatttgacagatttgaaaacactcagagaaaagcagtatatacccaaagtcataagaattgtaagattcaaagtcattcttcttgttagcttctgttcttttcactgcagtatgctgcctctttattccttgaggccctcagccaataggattttgtaggcgtgctgggcttttagacattaaagaactagccattgagttgaacattccatggtggattaaaccagcctaattaacttgtctctcctctctactacaggtcttcagtcttttttttttctttattctggaagcagtaaaactttgaacttagtttttttttttttttgtaagtttagcataaatttaatggcaaaatcatgcccaaaccaacagatggtaatatataatctttatttatcccacttagagtgaatagccatagatttcactccataaatacctatgtatttgataaggatccacaaacattttctgtaaatggccagatagtgattattttaggccttgtggaccataccatctctgttgcagctactcaactctgcattcgtagcatgaaagcagacatagatagtacataaatgaagttgtggctgagtgcaaataagtctttatttgcaaaaataggtggcaggctggacttggcccattgaccatagtttgtcaactgcctagactaaaaggtgatactcagatctgttgggactattgcataacatatatatatatatacacacaccatattacctttctgaattctgaaatatttcagacttgaagagtgtttagtaagggatcaagagtgtgtacctaagatttaaaggaagttttataaaggagaaagtcatctctattatggtcaagcattaaagttctcgtatacatatgtctggaggggcaactaaggttcagatattgctagtgcgttaatcaggaatgagttttgtgaacagcaaagcattggaacacatagcttctttgttgtcccttgtaacaagatcagaggtaggcagtccagagctggttcaagagctaagtgattccctcagggatccagactctgtccatgtttattctccagcatccttagttgatgagccttcaccctgatgctcattgtctcatggttgcgagatacatcctgtacctccagtgtcaaatgcacactcccagcaaggagaaaaaaagaaagcagggagaattgtctctcttagagaagtagaaacttacccctgcaaatctcgacattcctcttgtcggctaaacaaggttacaaggctactcctaattgtaaggaagactcaggaagcaagtatttttagttggattcattttcatcaccctgtaaaaacaggagaaaggatgttgggtgggcaagttgcacaccatctgctgaggcatctgttcttgtttggtggctgttatatttcgttacagatacttaacatcatattgtcttctcccttgaggaacatatctttttaagtatccccagtgttagcagcttgttttccatctgagttggaaaattaaataacattattcacatttttatgtaaatgttgtataatgtgcatatataattacttgagaatggttttcttcagaaatacattttcctattttcctgaggattttagttttggaggactttgtttacatgtgactctagtatgctgagtagcaaggcttgagggaagagtgaagttgacataaatggaaggcaacttgcacattgaggtttgtgggcaagtgattgttctcatggaggatgattccatctaagagcaagattttatgaactcagagaatcttaagaagaaacagttactcagtaactttcttaaaatatagatctgatacaggtatgagagaagagcaattaaataggcacacagagatcattttagttcttaacttgaatatcttgggatacttcctttcctcctagaggtagtatttattctgtttctggaaacagggcatgtaacttgctctttctttggtgtagactaccataataagaaaggatggaggtaactgcatgattttaattgtgtctttttgctttagtagaatgtcctaaaatgacacaagtgagaatagtgtgaaaataaatacattcatttattggttaagctttaaatgtgagtgaaattttcttcaactaattataatactaaattaattctagaatctgtttcaatgtagccatataattatgtagaactataaccctttattgcccagataaatcttgaccctgaaataatgtacgatagaccctcatctgctataattctgaaaactgcagtaagaaagccaaattttaatccaaatgtttcatggttctttgggcttccaagatgacaggctcatcaaaaactattcctgacttggccagaaatggaaagatcttcattttgatgggtacaaatgaagaagccacatagatacatatttggaccaagattccttccttttggcttcgagatctttcactaacaggactgaacgaaccagaatcaacagtattgggaaaagtagataactaaaatataaattttaacatgaacaaatttaccaactgattcagaagaaacagaaatcagagaagagatggaactttaaaataaatttaaattttatcagggagttgtggacagactcctatgaaaaggaggacttcaagagcaagaagggattcttggaaattaagtctgattgttgacttttaaaaacagcatattagctgaaagaaaagatgcagaacttttctagaaaacagaacaaagaaccaagagttggaaaaaaaaattaatgaaagtggagacattagagaatcattccacgtggtcctacatcttctaatagaggggaaaaaaagtggaggaaataaagatgcgcacacacacagatgttttaatttagcattggatcatcatctcccctgggcagcatgtcttttaaagtatctctagtgttagcagcttgttttccatctgagttggaaaattaaataacattattcacatttttatgtaaatgttagataatatgcatgtataatcacttgataagtgataagaaaaagaatttgagtggaccagtaactaaacacattttcacgatatttcagaatagcaaggaaaaggagaggatgttaaaagagtccagaaatgggagtggggtggaaagttgaccacaaagataatttctaggccgggcatggtgactcatgcctataatcccagcacttcgtgaggccgaggtgggtggatcatgaagtcaggagttcaagaccatcctggccaacatggtgaaaccccgtctctactaaaaataccaaaattagccgggtgtggtggcgtgtgcctgtagtctcagctactcaggatgctgaggcaggagaatcgcttgaactcgggaggcggaggttgcagtgagccaagatcccgccaatgcactccagcctgggtgacagagctagacttcctctcaaaaaaaaaaaaaaaaaaaaaagataatttctagaggactagaggacaagggaatgacttcatggtttggaggtaaaattattctgaacctgcaattttgttctcagacatactgcacatttaccaggaaggtgaaataaacacattttcagacaagtaagatctacattatttgatcaccccagatcattcctaaaagaattaatgcagtgtaagctcaataaaacaaaagaaggaaatatgggtttcgagaccaggtggaaaaactagaccaaggaatgcaataaaaaaaatctaagacaatagttatttggcaaatcttttaaagcagaacaaaaagttggcaaaattacaataggatttttggggaactcagaaatcctaaaagcaaatgacatttccctaacaggaagtgtgatgaaatggaatggtctgagtgagtggatgtagtttatactgtttaagagggctccttcttctcagtttttctttgttaatgttttttgagcagcacaactttagtgataatattgcatggctttctctctgcatttatacttaccacttgtttctgcagagaacaattatgtaattttcatattgtaaatgttattcatccaattttaaaaacgtgtaaaaaatagatagtacagaacatgatatcaccttgacaaagtaaaagtaataattaatggagaaaggttgggaagtagaaaggggaaaagaaatgaagagaaatacagggactctaatctgttattttacagagagaggatttaagagaaactcagtttggtgaattaagaaagagaggtttaaatacaaggctgtaaaagtcaattaaaaaacgaaatattgaaataaaactggcagagatggagagaaggagggaatggcatactgtggagttaaatgataatttctcagtaaacaaatcaagaaatagaggtttgagcatattatctaaagatacactcttcaacccagcatcccaaccatgtgtggttattgagccactgaaaggcagctagtccaaattgagataggctctaagtataaaatatatacccaacttttcaagacttagtatgaaaaaaaagaatgtagaatacttcaataatttttatattgattacatgaattgataatattttggatgtatttggttaaataacatttaatttattaatattaattttaccatttaaaattgttcttaatattactactagaaaatgtaaaatcacaaatgtgacttacactatacttttactgagcagtccctgatctagagatttggaggtacatttgaagaatggaaattagaaatgatttatgtgttcataccatcccagaagtggaccagggtgcaatgggaaaggaagagcctttatattatattttatatgttttagaaaattttcatactaaacactgagcagtttcaaagggctatttgtaaagtatatgaaaagcatgaggaatactatgacaacaaacacccttagtcaccacccagtttaagaaaaaataaataaaataccatagactttgaatgcatttcctccttctacttcaggctagtgtactgttttgattttcattttcttaataaacatagttattctctttttgtaaaaagtttctaattgaaggatatcttgtgtagttttttggcaggggttgttgaataatttgtcagtattaaattttagaatgtgtgtgccatttgatggcacagtggttccctttgagaaatgtattctgtatgttttgaaaaatgcagactgcaaaaaaatgtatagagtgacatcatgttaatttttaaaagcatgtatgtttatataattgtatagttatagatctacatatacatgtatatgctgacattgatgtatacatttacttgatatatatgtgtgtatatatgagcttatgcatatataataactaggactagtgcttgtgtctcagaagtcttattggattggcagaggagggaacttcatattcttgttttataaattttcagagagagagatgatcatagaattatgattttatttacttagatttgttcattttctgtatttttcaagtaaaaatcccttaaagaaataaaatacatgttgaaatatgttctagccccggagactatcttagaacagaacacattgccttagaaggtaagaagcaatatgtttacaaatgaaaaagaggctaagttgcatgaaagtattaaagccattatttttcttctctcccaccctaagtatattagtccaagaggcaagtgttcgcactttcaaagcaatactaaaattgattctttatcccatcctttcagtctaagacacttttaaagaaaccaccagtcttcctccagtgtgcttcattttctaacacagtgtaagaagcatgtgagcagatcacattaatgtaatgatgtgtgcttccagcaggacaatcaaagcaaaggggatgcatgaatctctctttttttttttaatttgctgagtgtagaccatgtataatttttgttaatgtttacttcttctctaatcatatatgtgcgtgtgcattgaaaagattttaggaaattcaaattccaaacaagaaattaaatacttacagtaattctgccatccagatataaacactaataatattttgttgtatttatttctagaatgtctagacatatacatataaccatttttaaaacttaggaaatatgctgtgcatatgattgtttttctcatagaatattgtgagtgctgtttcatggcattgaatgttcttcataagcatagttttaatgactgaattagatcattttagagaaatcaattaaaaatattctaagagtttaaattgggaatgaatatatctttgtggtgaggactgaacatacttcttcttttacttgactttgagtatgtaattgatttcataagtaaaaagataatgaaatgtttaccttgtcataatcaatagtgatttcctaagctgttaatgttaggtgaatggaagtcttcccctgtggatatggaagacatatccaaggacacattgttaatgagaacagactggctgtgcacttcgatactctccaataagtgaaaaaacagaaacttcattaatgaaaaatgacatggagctatatacccttgcattttaagacaaagatgaatctatattctgtccttgtctcaaggaggcagaaggttgcagattccttttggctgtgttgtttacctttaactaatgactcatttggcataaaccagcattatcaaggtgaattccacctgatccaagtctaatacatgtcatacaagacaggataaggtgatcattctggaaagtgggaatttggaattgtgtcttctatcgtcagttgaatgaatgggataggctgagctggaggaggaatgattcttttgggatatggggacccaagaacgagtgccatctgagaaccattaactttttttaaaaagtggaagatcagagacattcacaaggactataataagaaagagtatgatagctcaacatgagagaatagatgaggtagtcaggtgagtaggtgagtgagcgagtgagtgagtgagtgagagagagagagagaagagggcggaatttataaagagcatagctcccacctcctggatgccttctgcaggccagccacttgtctcccatgggttgggaagggagttacctgcaaaaggaagagcatggaggatgaggcaggatttcttttcacttggcatgtaaggatgatgagactggaggagtaggaaggaaggaagtagcttgaggtaaacagagttttaataatagaggagtttgaagagttgacactgtctggcattccatgaggaaacgaagactccttgtaaatgacttgcagaaggttacatggtttttcacaggaagctccaggaagctgcctggtactgttggatatggacatgaactatttattcctctaagatcctgacatctgagacaaagccaggatgttttatacaactctggactagatgtgttctctgatgaaaagtgaaactgcatcctctttgcattggaatttgcaggcactctctcaagctgctttaagtgagaaaaaggggaacgtattgaaagaacacaaggctgtgtccaggaatctcagagtaagcaggggaggatctaaaaatatgaactggaaagctttaaagaatccaggcagtgattgattttcagcggctctcttatctctgctcttccagtgctgtttttctctgcccttgtttctctgtatacatgaggttgggtgactgtcctagatatttacatgcctatttcaggcagctcttaactagcatccctgaagttcaatcccaaactctcaagagaggaagaagctgatcggctcatgtgctcagctttgagcacatgtccctccttggtccagtcagcactggccaggggcaagatcccagcacaaatatgggtgccatggatagcgttgtggataggggtctgataatacttgtcaaggaagaaaattgtgggctggagttctctaaaattgaccactacctaaaattgaccactaccctatgatatcttagcaggtctgggacaggggacatgatctttcaccatcactgtcttttcttttctaccaacaagaatatctagtcccttgctattgaaagtatggcccatggaccagcagctttagcatcagctgggagcttgttagaaatgcagactctcaggcccttccctaggcctattgtgttagagtcgcgtggtaacaagataccctgataattgtagagcactgacttttgagaaatgctaattagatggaggagagaattaggaaccaacacagaccagggctactgagatggcttcttccacaggtacctgtctccttttatctggcagctaatttgttttggccaagcttcagctaagagctatcccctgccctcactgagctcttatttaaggtgtttctgctagaaacttgagttcaggatgagctggagagagctgcctgtgttcaagagaaagatagtttttgtgtccatcttattgtgtattggtaccaaaggggtgatcagtgggatgaaaaaaggaaagagaaaagcagtaaaggtgttaaaatcatgtccaaaaggcaagtatcagcaagttcatttttaattagttattaccttgaggttacttatattcaatcattatactacacctgttttcacttctgcctctgaaagttttttaacgtctttaaaaaggcatcttttcataaagcttaagctctttgtgggctaaataacaagttttgatttaggagaaattactagataattctgtattaagtctatttagaatacagactccctcaagaaactcaccaggtagaacatctgtggcagcaattcagaaatccatgccattaatatttcggactttgaagtctaaaaagataaatttctgacactctaccttgcaggaactctgttttccttcattttctcttttatactccctaaaaggccctgggaactaatgtgtgtcctacaacctgccattattgttaaatcaatctgcttatttgcaggaacgctttaattatttagtaacctgattggaaaatccatataaattattttcttataaaaatccttactttgtaatagaagtgatcagatggaaataacaagaatttctaattctgtgggcaatcaggtggcctctctcaatggggcccttctgacatgaattcagaactttcatcagtgtttatgttgttggagtagaaatgtatagtttcactggatcatgttggaattgttgaagccaattgctgtaatgcacttgattttttgtgactaaatttctgtatttatcaaaacagtttcattttgtctggaaatgtaatgtccttttcttgaataggcatgtggaagtatttggaaatctttgaagtactgtttctcaacctgagctgcatattggaatcacctggggagctttgacaactactgattcctaggacccatctccagagagtccagagtaattgctctgggtgcagcctggactgtgggatttttaatcccttccctcccctgagattctaatgtgcaaccagtgtcaagagacatcatcctgtcgaccgtttaccaaacaggtgtggatgtgggcagacaggcttgtcaaaatgcgttttcccagatgccatcccaagacaacaaattcattagttttggggcaactccaagaatctgactatttaagcaagtccaagccccattgtgattttgatagaggaggcccttgcaccacatttagaaaccctttcttggagattatttctaaaaagagaatgactgggaccaaaatctgttcagtgttgtagtattagggaccatcagtgagtgattgaggtgtacttgaaaagatgacgaggctggggactgggcgtggtggctcatgtctgcaattccagcactttgggagctcaaggcagatggatcacttgaggtcaggagttcgagaccagcctggccaacgtggcaaaaccccatctctactaaaaatacaaaaattagctgggcatgttgccacacgcctgtaatccctgctactcgggaggctgaggcatgagaatcacttgaaccccggaggtaaaggttgcagtgagccgagactgtgacactgcactccagcctgggcaaaagaacgagactctgtctcaaaaaacagacaaaaaacaaaacaaaaacaagcaaccgatgaccagcagttatgtggtataggggcaagactcctggggtcacaacaaaataatagagttctgattctcacagtgttttcgttaccagttctgtggccctgggtatgacacttaatctttctggtgctgtttcccttcaactccaaaaagagggcttggagaatattaatctcaggtcctctgaagctgccatacttgattattctctgatggtaaaaatcttccattagcataaattcttacagaaacttctagcagtgctgttgatggatgccctgcctcagtgggtcaaaaagcatagtgcctgggcaagcggcagcatggtcatcttgttagaaatgcagattctcaggccccaccacagatttactgaagaagcatcttgggaatgggtcccagctgttttaaccagcccttcaagagatttcgatgcatgctcaaatttgaggagcacgcctctaaaaatagtacttggaaaaaagaaagttgataagtattctttttacctgtggtgaagagaaatcatttgctaaacatataaacatttaagactatttagaaagaaatgttggcaagcagcttcaagtggaaaggtaactgttaagagaaatactgaaatctacagccttgctatacaatgtgtggtctcctgatgggtcaacattgctatctctggagaactgcagaatctctgtctctgccccagatctactgaatgagaatctgcttttttttgttgttgtttgtttgtttgtctgtttttgcttgtatgtttgtttgtttaacaagctcgcttggtaattcatttgcagttaaagtctgagaagcactgttctagataaagatgttaagaccataatgtcagctttctcttacttttgtaatgtgtacctatcagtaaacattactgtgaggtgtcccacctcacacgtctgaaatcaaatccagtaaaaaatttttggccctgtaagttggatccacacctatatcaatttaatagttagtatctgttattttcattgtgttttacctgtttggggcttttaagcctttttaaaaaacattccttatggaaaaaaattgcttaatactgtcgctttctttttccttttcttcctcttttgaaagctgccatttcagtctgactccctatagtacttgaacatttttaaattatttttttctagtgtctgaccacttttctaaaatggaggctgggtagaatattgagggtttgttctgtgggtttgattttatcttgattcattgctacatttctatatttgtgtgggtctcaataaaattataaattagaagattaatgttaaaatgttacaaattataaattaagttaacattaaactgcaaaatgtatgggaaagaatccttaaggatctgcagaagaaccttctaaattaacagagaactagccttgtgcagcagtaccttaggatagagataggcaacctgagatttcacaaatagaacagagcaagtttatgataaaatgggtggaaatggagcacgacatactacgtgtatattcttatgtagcaacttttaaaaataactcttttaatcatttgttccctccaaaacttaggtactctctctagtcacagttcctaggtactgggaaatttattggcttcaaattatgagaagaaaacaacagtattaaagtgattttcattaaatatgtgccaaatatgacatttcttcaaccattttgtcaactaggacattatatcaacttgtaacttaaatcatctttatgacttatctataagctacatttgctgtgtgtgccttcactatgtttgctatgatttggggaatcaagaaaaattcctaaagctaggaatcttagaacactggccttacatggttaattacttcttttcttctgtggttattccatgtctatttttctgtttagaagtagaaattagtcaagctttttaaaataattattatttgtaataaaatatatcataaaagggcagtttttatttgatttttgaggttatttttctctctagaaaatcagttattgacctttttggggggttaaaactcatctgaaaatctcatgaaagctgaagaacctgtgcttagatacatgaaaatatgtagaaaaatatacattttgggctgaagattaaccttcagtgtcagtgctataatttgcatatttgtcccctcctgaatttaagttgaaacttaatctccaatgtggcaatcactttaagatgtgcttgattcatgatggccctgccctcatgatagatttatttgttcatggattaatggagtaatgggttagcatgggagtgggtctgtggcttcagaaaaagagtaggagacacctgaccatggtagcatgcctccctgaggtggcacagggcatcacatggcaaggaggctgagtgtgctaacatggttaggtgtctctttctgtcacttctatagagagtctccaccagcaagaaggccttcaccagatgcagctgcctgacttgggacttctccacctccataactgtaagacataaattccttttctttataaacccagtttcaggtattctattataagcaacagaaaagggactaaggcaatcaattaattcagtaaagacttttttgatgacaaaaacaaactagcaaaattaactagtatgttcaccacaggagttttaagtgagacaaaggtaactttttggttctcattgaacccatggctgggtctagggtcttgatcagtctgatcatacttggtttctttctgtttctctgccatgtcttctgctgtgtttggtttcatatttcagtcattgacagctccaggctgatatcccattattccaaacatagcagaataaagactctaatttcaaagtatctcaagtaaatctcagaactgagcttgtgaatcttgattgcttatatctgggtattttgtccattcctgaaccaagattattccatctccagctgtggtaggtcatagcccaagtcacaatctttcacttttagagtcagtttcacaggaacctcgggaactaacagcaggaaaaggaaggatttctagataaacatcagtgccctcttatccatacaagggggacgatgttaagggggaaagactatcaacatccactgcagaagcagaaatggtgttaagagacaaagactatcagcatccacaaccatgagcaaccactgttttagaggtaaagaaactatataattagcacaggccaactctttttttatttttataatgcccagactacatgcatgtcttaatcatttcttttatataaaatttctgtgcacctaatgagaaggtatttttagctacacatccatgacccttatcctcattgttgcatttctcctctgaaccttgtcatcacctaccttgcccaaaaggcactgcttgttttagccattgagcaaggtgggtaagcatattgaatttgctgtcatatcctccttaaaggtgcagcaatgcaggtcacatgggatcaaaaaaatgaggcttattcctaatactttaggctatacttgtgaagcctcatgggaagtttttctttaaacaagtctacagcacttattttaggcttaactaatctgattagttgttaacagaaaaggatatatttaaagtccacggatatgcaaacatttaatcagtgagtataggttttatgttctgtcttcatttatcagtgatgagagtgaccttggctatgacctcccacagctaaggatggaatgcttttggttcaggaatggagaagatgccaagacctgaccaattaggatgaacaagctcaattctgagattttatttgaagtacattggaagtggagtctttcttctgctagggttaatactactggcatattagcctggagctgtcagccataagagataatatgttcaactatgtcatcattccaacacagtgagcaaggactgagtgctactgaaaaatctggtaaacagaaggttgtttcactttggctatattttgctggatttaaattgaacgtttctgaaacttctgaataattctgtcatagaaagatccacgacagggaacattttataaataaactactcttatatcaacagagatcaaggcaaagaaaagaaaccactctaggtatttcacacaggaaagatttaatacatggggattgggtacttagaaaatggcctgaaatgctggtgaatgatgaggaatgttgtagccatcactggacttttgagttcaagagcacacccactgttgctatagctgctgtaatttcctctaaaacctgtatctgtcaaattgtgattgccaggggcagtagcagcaggaagatggccactgccctttaaatatttaagtgcttctaactggtgaaactcagatgcataggagtcttggaaatttaatgtttaacctcctggcctccctaaccaaggaagggtgggttggcaatatacagacaatccatagtacataatacagtattaaaaaaatgggttcccctgggattttattaatgaagttccttttgtattcaagagaaactacctgtctatgacagcttaaagtaatattaagcatcactaaatggtgaattaaagttttttctttttatttattttaaaaggtacaaacagtaaaattcatactttttgatatattagatttgacaaattcattgaatcatgttatcactgtcataataggatacagaacagtgtctttactccaaaaaattcttgtctgttgtttgtctgtattccagctctcttcccatctatacctcctggtaaccaaggatatattctccatcactactagctttgccttttccagaatgtcatggaaaggtaatcatacaatgtgtattgaatgtgacattagtagaatgcatttgagcctcatctatgttgttgcttgtataggtaatctatttctttttattgctgatcagtattccattgtgtgtatgtaccattcatgacttacattttgaaagaatcacatatttccttttattcaaactctccatatatttttaaaaaataacatggatattatgaaccctacttgcaacttcaaactcagtgttctttattgatgattaataaggttatatagtttaattatgattcctgggtaggatcaagaaaattagacaaatctcaagaaatttccagtctaatatatagatcaagtatgctacctagaatgtaccaagtgcccatttatgccacctcaatgagttttccaaaaaaaaacaaatattttttagatgaattatttgttgatttccatactatcatggaaagatcagtgaataccacccatattttcatttgaaaagatggactcatttttggccttattcacagacagcctttcttccagacaaatttcagcatattttgatgactcattgtagaaattggtttattatttgcagcaggagaaagcattgctagccaacagctgagaaaaagaaaaggttacaacattctgttttaggtctctaaaggccttattgggcagaatgtaatttccagctgtggattcatccagcctttgaggacttacccctgcctgttttctgaagtgttctatgattgttcattacctcaagttgtccattttacatcttatttgaaagcaggaccctgacagtgctaaactttctcaggctcagctgaactgtcagaggtaaagaaaccaagaagtttgcttgtatttattctaccccagacattctgcatattacattcattatctcacaactttatcaggtaggtagtagtgttaccaacatttaacagttaaggaagctgaagttgaaagaagttagttaccattcccaggatttacatagctcattcaagaatttttgaacccaggactctctggtaacaaagtttatgcttacaaccattttgcatttaagctttctgtcatttagaagacattgacgttgtcattactattttttatacatgaattatgtgcatctataattaagatgacaactgcttgtccagattacttatccctgtaaaaaaatgtttccgaacaatgtgaagtgtgagtaaataatacatcctgcataaaatgttttgtggatcaatgagatggcttattagaaacacttagcttcttccaagaagggtttccaaaatagcaaatgtagtagaattctttataacacttgtacctggagtcagaagtcacacgtaacatcagactaactatatcagttggggcttttagggttgtgctttttggattttagagggatgtgatttgacctttgattaagaaggcatcatggggctgggtgtgggggctcacacctataatctgagcactttggaaggctgaggagggaggattgttgagcccaggagttcaggacctcagcctgggcaacacagcaagatcctatgtctaccaaaaaaaaaaaattggctgggcgtggtggcatgcacctaatagtcccagctactcgggaggctgaggtaggaagatcacttgagcctgggaagtcaaggttacagtgaactatgaacatgccattgtactccagcctgggcaacagaataaaaccctgcccacgcacccccctcaaaaaaaaaaagagagaaagaaaatatcaaggtaccatggctaagaaggtataacaatttcttaatacagaactttgttgctgttgcaatgaggttcgctgtatcacttgaaaataatttgaagaaattaaatcagatcagggccttgtacctaaaacattacatgtgctttagtagtcataaaatatgttacgttaatgaggatgctgactggcaatcagaagtctaaaatggggcattactgacactttacatgctgtcatagttaataccatagctgcaggtctccaacctagactattgagggtctgggtctcaacccctatctcctctcctcccctcattcctcctccaccctgaattacatgcaagcctggacaatattgctttagcactttctaagtatattttatgttggcaagtcatatatttactcagttcttttgtgcaaagcaagtaagctaccagagctctccccttggggccattaatcaaattgtttttgagcttttctgctccccagggtggggacgtgtgacaaatttcttggtgagcatacccttaaaatgaaaagatgttcttgggtgatatcagacaaggtcagtttgttctttggtgtcatgaaaaggctctcccagtttgttcactgttactagtgaacttgacttaccttgtgagcttctggttacagggattttttttttttttttcatttcattttacctaccttggtacctagcagtgttggatatatagaaggtactttctatattttgtttttggaaaatactttaaagttacacaggagaaaatatatccatgtaattcagaggaggctggattcccttcaggaatgggggcattattggttttaatcctcagtatatacttattagaaaataaacaatgagttgaatgtttgacgtaggtcaagtagcatgcaggaaggataatcatagacctgcttttgcaaagcgtacaatcaagggtaaaagacttacaatgtgagaatagaatgatgtcactaccacttttatcattactcttgcctagtatgtatcgagcaacaatgaaacgtcagaacttcttctaagtcatttcaatattaacgcctttaattctcaaaacaacgctcttgaagtaagcactgtgattattcccattttacaaatgaggaaactgaaatacggagaggttaagtacttgctgaagatcacacagttataaaaggcatgcctgctatttgaatttttgcagtctgactccagagcccatacttgtatgtactggtcagatggaagaagcaggggatcccaaatgagcccctcacccaaagctgtgggttagagaagggtcccagagtcagtgacatctgtgctaagtcatggatgatgggtaggtatttgccaggtgaaggaggaggaagaggaaggtgttgagttatgttctgttcggatgataatacagactggttattatggttgcagtgtgtgtgtgtgtgtgtgtgtgtgtgtgtgtgtgtgtgtgtgtctgtttggagcagatgatacagatgctcgagccagagtatgtatgtctttgttaagccatgttattactaaatgtgggtttttatcttgtgtattgttgtgagccactgaagggctttaatcaggtaacatgataaaacttacatttttagaaaagttagttgggcttctgtgtagacaatgaaagaaagaacaggaggaagactgctggcaggatattaactaggaagctttgcagcagcccaggaaaggacggattaatacaaaactagagtcaggggaagacggggcagatgccagagagatccagggagtagaatccagcaggacttcgtaactgattggctggataggagagaagaattagacagaagagtcacatttagagtatttcaaagaaaaaaaaattgaattccacagttcttgctccaggccagtttttcattgttcttacagttcatttttctttagaaaggaaaaggcacattaaatgttaaagaaacagatgtacctgattttttatggactcctggtccatttgactttcctttctaatgctatagtttcttgagtttacactacttgtggtggcgaatactttcagtaaactttcttgtatgtcatctcttaaaaattgcaataccaatccctttaagttgccgtaaaaaagagagggcaatgcaggatgagagaaattatgcttgtcttcagtatcttaatgggcaccatactccttagatattaagactgaatctgacttttaccccccaaattatcagattctgaccctattttatttgcacatgtaaacacatgtttgggaacagcaaagttatttccatcagccttggacaatgcatttttataatggcaaattctattcttaaatatcccacatagggttaaagaggaaaatatcttctgtcctacgaaaaccatgccttgtgctttgcctctactctttgtttctgagcatcagaaactgtgtttctcttgagaatttccatctgctgataggttttctctatggttctagagagcagataaagatacaagtatcccttattatatgacagtcttgctttttctgtacagtacaggttttcaagtagtaaaattcctaccttgtttaaaatgtttaaaatctatactaattatttggcccctttcctctttgtcccttttcattttgtaattgtcattcaagtgtaagaaaaatataaccatgcttaagatacttgaaaaaatctttccaattcagaactctttgaatgtaatagagactctttagaattttaccatatagaaggaaatactgtttcaaccaccatatgaacaatgatttatgatatttcttattgtattagcccgttttcatgctgctgataaaaacatacccgagtctgggaagaaaaggaggtttaatttgacttacagttccacatggatggggaggtctcacaatcatggcggagggcacaaggcacttcttacatggaagcagcaagagagaatgaggaagcaaaagcataaacccctgataaacccatcagatctcgcaagacttattcagtatcacaagaatagcatgggaaagactgactcccatgattcagttacctcccactgggtccctcccacaacatgtgggaattctgggaaatacaattcaagttgagatttgggtggggacacagccaaaccatatcatttatgaaacagcattacctggtggggaggaaacaagtggcatattatcaaatgggacgctattattgcacaaggtcatgtggctgttaaatggtagagccagaactccagccttgttctgtgccattcctaggccctgctctttcttactttcataccacacatgtcattcctgcctctagctcacggccacagtctaattttttgatagggagcaattccagaaatgaagattcaaatcccaactaattctgttctactgaaaatatggcccatggaccagcagcattgagatcaccagggagctgttgatagctgcttgtttttggagtgcttattttgtccaagtgacgtgccaactccattacatgcattatctcatgaccttctcaaaagatgtgcaatgatacaatccttctttttccacagatgacaaaagtaaggataggaaacttattgaccatacttgtccagtgctgtacaaggaaaggttggaggtgaatttggacctagctgttctgatttcagagcttatacttttaaccatacactgcagtttaggatgcatgtggagctgtttcaggggagagcacagtagggagtgggaaggtgaggaggaaaggaaacggatggcaaatgtgtcacctaggtaggctagctgctgtaacaaagaggaccacaaacatgtaatggcttgaaaatatttatctttgctcatataacaatactgggcaggtgaaggggttgatgcaactgccacatgttttcgtttattcaggaatccaggctgatgagagctctgtcatttttagcacgtagctgccaaattcaccctggagtcaatgtagctagaaggacgaaatcaccaagaggaagggatgttcctgggaggatattttatgggccatgcccagatgcgatacagctacttccaatcacatttcatgggccaggactcaggtgtgggggcctgagaagaggagccagatgtgagtctcagacggggaggaatacctggattttactgagttttcaggaaatagtaggtcataagccgctattagaatcaagcctctgggtacatttttatatgttttattctttcaggctttgtgagagggggttatttatttcatttgcaaagcagtgaattgagatccagggatttgtccaaggtcacatggcttgttctgtgccattcctagtccctgctctttcttcccatcataccacacatgtcatttctgcctctagctcacagccacagtctagtcctttgataagaagcaattccagaaatgaagattcaaatcccagctattctgttctactcaaaatatggcccatggaccagcagcactgagatcaccagggagctacttagaaacctgcagtttcatacttgggaggctgaggtgggaggatcgcttgaacccagtttcaggctgcagtgagtgatgattgtaatcctgcactccagcctgggtgacagagcaagatcttgtctctaaaagaaaaagaaaaagaaatagaaatgtgcaatttttgtccctaccccataactgctgaatcagactggtcattttaatggggcccccaggtaatctggatgcacagtaaagtctgggaagccctggaccaggttcctggaagccagcttctccacctactgccgctatgtgactgtcatcttccttccgtgtgggagaagtggattcactgcatgttagctacagggtataaccactggagtaaaatttcagcctttttgaagagtaaacatgtttaacctagaaaggactacttagcaacataatattgaaagaccgctcagcccattttttgaaaagcatgagctgtttccatagataagccaaacaggcctgaacaaaacagaggaaaagcgaactttgctgttttgatttgtggatgatgatttgattttctaaaaagaacagctttgtttctttccctgagaacataagattactgagttcttagagcctcagctcatgcagctttcctgcttgggtatatgggtagggcaaagccagattaaagatgcacagtatcaagccatctgacctccaatgccagatttcctgcagtagtctaattaccagtttattagctgttaaccttgcaccacagttacaaaacggtaactgctggttagagtcttaatagttgataagtgtcagggagggtcttccttctggtgagaccagtatccttgtgagtctcatgatgataatttgctttagagctcagtcactggaagggaggagagaagggacataatgaccgagggtacccaagtactgtgacagaaggccatagacagctttcctatctaggaggaattcagcctgaagcccacagctcaaggggcacacagaccaggcactcctgttttgaaacaataaaatgaaactgttttttgcaagttttgttcacttgatcattttgccctgtgtctgtgatttcccttagaataaacaaattaggaacagtacctcggttttagtataagaccaagtgcagccacaacaacattgccttagaaggtaactttatgctatttgtattcaattaaatctcacaagccacccagagtgaatgttttcatgttgctttcttagagatatgaacacagagaacagaagcttgcttaagttcagagcaaacagaattccagttgcacggactctcccagttacagctgtgtgcttatcaatacttggtggatagggaagaggtggcttgtgaactgcaagactttaatacatgtcagtaaccttctactacaaattgaaatgctctgtaaatcaggaaagggtttgccatttttatgctagtgtatttcacgacagtccagttggaaaagagttagtattgatgttctattggcaaggtttccagaccagatttgatttataagaacagcactgcatataagagtgtacattgcttagatgggacatccaggaactgtgttaatctacattttcaggtacttctactcaagagaagcacagaaaatatctttacaaagttccaaaattaaattttagaaaaaggtttgaacaaaaatgtttgcttattaatttatccatggttactccagcgagctctctcatgacaactcatggcatgctttactagatgctgggccctatgcatgggtttcatctgatattaccctaaaaaggactcttcacatagatatcataaccttcagtttacagtttgagggagctgcattggatctcacaacgagcagatatgagcgctggacttccagggtcctcgaaagtagcaatcactgtgagtacatgatggcagccgacacatagaatggacgtggtccatacaggccatgactagggcaggttgtctcactcacacaaggcctgttcatttattcattcatttctcttcacttgtttaataagtacgcattgagaagttaccatgtgccaggagaacacaaaaatgaaagattcacaggtcctgccctcatggagttccccactgagtttttgtttgtttgtttgtttaaatacaagctttactgtatttcctttcttggatggttacatctaggtaagacagatacgttgtatgttggatggcctcaattaagcaagatgctaataactttatgaaactgtgggaaaaatttggagtatgttatttggttaaagaataggaacatttctaaggacagattacaaagttaaacctaaaattaaacagtttgcttgccaatgtattccttttgtgtattcctttatctgtgagttcattgaatgcttcctatgtgcaaggtattatgcagagtgtaaaagttgaattcagtttctcatgcagctgaaacttctttcagacttggacatgagcttgaaataattagagtgctagatagaaatgttcattgccttggagaggtatgtataaagtacttgggatttaaaggaagagagaattagagaaaacgtgaagggggggaaatgacatttgagccagacatcaaaggacagacaggattggaagatggggagataggtaggaatagaagattcattttagccagagagaacaatagggaaaatagaagagtgactagcaggaaattcagctcaaatttgagatatgaaagatattttataggtatcaataattgacttacttccaaagagttcatcatcattttaatcttccttgaagattattttttaaatccaagtaagatattttaaaaattagaccgtacataaaagttgaaaaaggaaaaaaatgctgaccttcactccagtgaaaccactggctaacgtttgagtattttccttcaagtcttttgcattttgtttctgtgcctctttttgagtagttgaaataatgtattgcattctgccttttcatttaaaataatactaccagcacctacccacgttatgaaaatctctttggaatcgtcacatttaatggccttatactgtttagccgtttggctttgtcatagttgactttaccccaccctattgctggagtttagggtgtttcatgttttccattgctatgaacagactagctgttggccagccaaccctttttgtatttcacaaatggtaaagccaaggcacttgtaataagccaagatggggactgacttgttcagttgctagaagccaaaagactgttgcataaaaagctgccttctgactagaagaggggctgtggggtttctaggaatagagattaataaggtgcttaggtcatatcccctgagaagtttaatctgagtgggccactgaccttctggcctctggaaaggagatccattgaatttctaagccctttggtactcctcccatttcctgcggaattttgattgtgggtaaagtttcaaaacactggctcttcacattggatttccaagttgggaagagaaggcaggaagacctatcaaaggacaaagatattgtgttctccacttcgatctgaaagatggaatggcaggggagaagggaagggaaaaaaaggaggtgggtgtctctgtcctaatttcactgggtttctcatcccattagttgaagttagcaaacaggaaagcattctccttaggaagaaaaatggcaagaaaactgatgcctgccttgcttggatttttagtgttgccaaacacctatgtttgtgacttattgattttgtactatgaacctagcctgctttgcatcagctcttcttgtctttggtcgcgtcttttctttgtgaaatttcactcggtgaggaaatactgaattggagggagatacggtccttactgagcatgctgaagtaaatccagctattaaatccagcataaatcccagcagaaagtagtgtatcagaaatgtggttctgtatgccgaacatgtgttcataataacagtgcctggaggcatatttgtattatagttcagcaaaggaaggagacaggaaggagactcttagcttagggcaaagaaacatctgctacaaaaaaaaaaaaaaagaggtataccacatttatgtaataaatactgttttgaaagtttctctgaaattagtttcccatattaaatcatgcttcaaactttcttaggaacttcactttttcaaagaatcgttctattaaatttttgagagagagcagaatttcttaacagttaagtatactaaccctgggatgaggctaccttattcaaatattggcttcaccatttagtatctttgtgactttggaaagtgatttaattgcttgagggcttaatttccctatctgcaaaacagacacaataataggaccatcacataaagtctctatacagattcaatgtgaaagaacattttagaatgcagtattagaagtagtttaatcactttaaaatgttgctattaataatctgttaattagcaagtgatattatgcatgtaaaataaaattttggaacaatatttttcttacaatgagccaggtctgtaggctaggcatattaaaatatttaaaataagtcatggtatattaggttaaaatgatggaatgaaaacactccaaatcagagtttcaaagtaattcaactgaactgtaaagcaaaataggtataacacaattctatgctaaaatgttttaatcttaggtttatcatataacattttattacctaaaactgctaaaacatgtaggttttatatttaaaatgatagtttgtatttagtttgaaatgtggagctgaatgattttgcaaaattaaattgggaatacgttatattttaggtaccctggaaaattgtctgtggttagatggctgatacctttccttcttatttagtttaattgaaaaaaaattggcattgaagaattaaacacactctaaaatttcaataaatattccatgactactttatttatctagatatcaacttactaataatatcagccatccaagttaaacaaaaagtaaaacatccagaagtgaaaaatacagccaaatgttgtacatggctagtatacagatcctgctataaaatgctattataaaatccagctgccctcactcagagcctactgattcttatatatcacataatctttcccttgttccttcctctgaagacagtaggagctataaacaggaacagtttgggagaaagcaaagcccggcatcaaaagagatatagaacaaaatgtagacacacaactttgttatcacagggcatgatgaccaaggcattcctttcctcattcagttattcacttcttcatcaaagattctctaatcatctgtgatagtaccagtctgtcttctaggtataggctttagaaaagtaggtaggagagattcagagaaaaataggatataaacatttctctgtcaggttgctcacaataaggttgacgtatttgtgttcacaataattcatgtcatccagaaaagtgatgttacagttttatgtacttcagagtcacagatggtttgctttaattttattatacccccatactcacaccctggactgctttgcaagtttctaattgcttcctctccctgcctttttattttggatttcctctcttcttccctgtatctccttaatactcttcaataatatcatttatataacacaatcacagtgcccacttactcactagagcctcacagagatctgtcatccgattcagcctattttagcaggtatataggttagcttttgttgtgtaacaaaccaccctcaaattttgcagaattttttaaatcatgttttatttctcacagttctctgtatttgttgagtggtttttctggccatggctggcttggctcaggttggataacctaggatggcctcactcactttatttggggcctcagccaggaggactggattgactgagacttctatgtggcctctcatcttccagtagattgtcttaaccttttaaacatgataatctcagggtttcaaagagaacaagaaggaaaccccaatgtacaagtacttttcatgcctctgatttgtttcaaagcaagtcacatgtctaaaacccattttcagtatccatgtggaacgaaagtcttcatatcttgatgggagaagctgtgtagtcatattacaaaggagtgtgatcaagggaggggaagactttctggtcatggaaatggtctaccatgcctggagaaggagtggtaaatatatccccccagaagggacacactttatcttcaggcagaaaccattggcctgaactagtcatatacatgctcctccttctacccctgcccccagctgaggctgcatgcaaaggaggatgacaaataaataaagccctctatgtattacatttgtctcacatgacaaagttctatttcacttattttcccttgacaaaatccattgaggcctttcagagttagccatattcaaagacaccatgaatttccaccttcaactcttaggtgtctgaaggctgatcttctaataggtggggtttgggggacggttttatgaagtactttaaagtttcagaagcaagatgctgtcttgctgctgatcatttatagtctcgaacattacatgttgcatttcacataagaattcttatcctttatggcctagctcagaagctttctccaggaggcctttctacccttttctctcctgggcaggggttatctctcctggttctaaattcctgtaaaatattattttgcttatgttgaatagtctacctactctgctggatttgagtttgttaggatagagtctgtgtcttatccactattgaattctgtgtagtatctagtctagcagggacacagtgaaataataaatcatcccttgataaagaaggaggaggctatatttaaccctaatgccctactttattccctttctattatattttttaatgttccatttaattgttttctatccctgagtcaccaacacttaaggccactgtcatgtatggattcctctgttaattccttcattgagaaaagtcagaagagggacacattcattcattctatacaggtctatattgagcacccactacgtggcccatatatttgtgtgacagagacacagcagaaaacaaaatatatgtagtcactactctggtagaggaaaacacaaacaagatatataaaggatcagagatgaagttgttgatgtgtgttacgtagaaaaatctaggaggtaacaagaaagagagatcctggtggtggtgagatgccattttgttctgagtggccaggaaaagcatcttagatatggtgacatttatactatgatctgcaggcagtgagccatgccgatatttagggaagaatggtctaaactgaggtaatggtaaatgcaaaggccctgaggcagaattgcaagtggcctctatgaggtacaggaggaagtccatgtggttagagtcaagtgagcatgggaaaggaataggagatgaatggagagagatataaggctagattatgtaaggtcttacagcgtgttgtatagattggcttgtatcccaagggagatgaggagccttatgaagaaagggtaaagaaccaaaggtatggagaattacatgggtttgaagaaagagttgggggagagggaaatgtatgatctttttcgtccctgtcctccaacattaagtggatttctcaccttggtcccccctgtgaaaaatctacttccaagattggctctgtgtttgctaatcatcagtatctatgacatgtatagaaataccttcttccacaggaaatagataaatagatcagagataaatagactatatagtgtttgctggtaattcttgccattttaccagatataatcgtttaaaaaaacatgtcccatatttatgtagtgctttattataatttaggttctcaaaaagattagtttttaaaccaggtctagagctctgcttaagttgtttcaacaaaacccaactcattatatgttataaatgaaaaagcagttatttaaattgcaatggccttgatgtcacaggactataaatgagaggatgcccaggggaggggagaacattcactttcagcatgataaaacatcctgcatgaagatatgttatttttacaaactcattttctgcaaagaaaaccatcaaaaaacaaggaactttctgtgtaagtgtgctaggaatgttttttttttttaaatttgttacaaaagtaacatattataataaatgtaaacaatttagaaatttttagcattttaaaaatgtaattatagtcagtttataatggcattattttaaccagggcaaaccagccttgttatgaacacatttgtttattttcaagataatttgattagagccaacttattggtttcatgtgactaatactgggctgtggtgtgcattgtttagtcaaagaaaaaattaaattatcatttttactttctgtggcctttagtaaataaaggctgatttactaaataaagcctgacttactaagttctttttagcatagtatagttctcctcatagtagaattcataggaaatcttggccctcttttatgataaattgatatgcttgggtacaagcctatttattactgcaatatagacctgctttctgaggttcttctttctcaggaaagtaaataaacattacagaggatatttgctactctgtgtgacccagtaaagagttctcctggagaaaactttgcaaataacatgatcaacaattgcatgctttggggccataaacaaaataagcaaaaaagttgttttagatcctagaaaagcttgatggagcattctactgtctggtaaacaagaccagagtaaatatggctccaggtagcaagtgaacagccagaccagggtcaaggccagcattcgcttgcaggggttagaatgctgtacagcagtgaaaatagtgtccatgtctattgtgaaatagaacaatgccataaatgcgtagacatcatcttttctatcttgggagcctcctgcaaagtgacattataggcatgtctgttttcagatggggaaactccttgaaatatagtttgtgggattctctttcagcttcacagtaattggttgaagcaggtcttaaaattggttcttttcacatggagtgcactttaccattaaaaggaatccatgtgtctcatgaaaatgtgagttatcttgtgtaagtatgtgtgttggtgggtatttgaaattagcctggagtttaggagttttaggggtttttccatctacttttaaattcttggacatagatgcctacaattaggtagtttatcaataatcaaataggctaaaatataatgaacacatttgggatatatctccacccataaaccttcatacttctttgtaaaagttttgctgaagaagtatgtgtttatcatatgaggaggtggttatgggtatagtggaagagacagatttaggtttggaaggtaataattagggaaggttctctggcttctggttttacttcaatgtttacatctatttcttcaggcctaaagccttttgtcccattgtcaagaatagttcaggaccagtgttttattccatgaggccaagagagaaaatgccagttgtgtggccaatcacttaagcttaagaatgtgacatagtactctgcagagaactaagaatgtatcttgaggtactacatctaggttcaaatataaccacaacatacagtgggattcacagttattttaagaccacgccagtgaggtcattctgagtcatgacctcatggatagaggattctaatcaactgctgaagtctacagagaactaatgaacgaaagagtcctgagatctggtaggggaattttgaagcgccatcagtatctttgtatagactttccatcccctaggatctgtatggtcaaataaccagaaaggcttccatggtcaccttcctggacacctggctgtgagccaaacaacttcttcaatctcttgccaggtctctagtctgtgagtcaaagaataccatatttatgagtgatgttttgagatagtgggtgctctgtgaatttcaggtagtgtttttttgtttgtttgttttttcctcaccagggagcatcataatttttcagcatgtttgttaacaatgtacattttattttaaaaaaaatcatgacaataaattcatacattgccaaataacaggtgtctgctatctgattctgtcagataaactttataccttttctggaatatatgagttagaaaacttcaggtatcagactcagctgcctcaagtactgacataccaggcatttctctgtttaatcatcactcaactcatggatgaaagtattaggaaacagaagggattatgaagataactaaagttattactggcacttgaactgaatttctcttaaaatatcagtttactttgatatgtgctacaaagaccttaaccatgtttctgtctgattcttttgtgaaatgaaggtatcaatacagaatgaactgttttgataagctccctcacaattttaaagtatagagttaatctctaagaactaataagcaatgattccattttcttgattttatttttatgagccacagttttatatcccactgcttatctgatttgaaaatggttgtaatattttgagaaagttaatatcgagtcatgccaaaaccttaataaacttagtcttgaactaatatttcaggctcatgagggatttctgtatgctaagatagattttaatattacagaaatgcaatagtgacctttccataaaaccttaataaaattactttgttctataaactgcagaagagatgggaactttcttgaaagagaatatgcatgatttatctgcatttcatggcttaatcttatatctcatttcttcagatctcttatgtttttcttttccttaaggcaaacaacagtaatttccatatttttaaactagagaacagacagaatttttcaaaggcatgttttccttttgcaccagtgagattgggttttggactggcagttcaaggatgtggttctattgcagctccaccagcaggattgtggcaccttgccaagctcacctgaggtttcttggcctatgttcccactctattacaggaagagctcagattaagtctgaaatccctaggattatcttttatcgactgttgcttaaatgttataactttcatattcttcaacattcttgtattttgttgatatggttcttaaaattgtggcacagaaatgtacaaaatactgtaagcaatgttaggatctgaaagttcactaattttattatagccctttatcagtgacctccctaagactgcgttaaggtttcaacaagtacctcttcaccattagcttattaaggttggagttcaccaaaagttcagatgtttttcacataaaaaggcctttttcctttgtcctgtagttgcttttttttttttttaacttctacgatctttgcattgctcacttttacatcaatcttgataatttgtcttattcttcaaagcagtccttttgtagcagtgagcccatctcaggacatatttggacatctggaatactggagggagcactggtggagatgtcttaggaggctgctgaaaacgagggagtggagttttggaagggtgaggagaagagtgataccataggattgccctgggagggagaatactgagagccaaaaaggataaaggacagaggaggtggagggatggccacatgtggaaagaggatcaggctgaaggtaggagttacattctggaaaggttaagaaagatcaggatcaacataagaacattgagcttaaagaccaaaagtttcagctactcaaaaaggcatattttgaacagaacatatatgctagattccatattttaagacatttacagtgagttgacagttaggaaatgagggtatccagcaaagtcttttttccttttttcacaaaaattggccatgggaaggtataacatagatggccaaaatataccttaattataagtcttcttctctgtacaacttcagggcacaataattaatttagtgacagtagatattttatccccaaaactcaatttaacttattatccatgcaattgtcatacttgaatcttatctcttttcctgtcttaccttgggggttggtttcaaatatggcagaatagaaataaaaatatatatacaatggcttaatcacacttgtgatttcaccagtattaaatataggcagcaacattgattttattaaaatactccctataaatattccccaaatagcattgtagaccaattaatgtcatggcctaagtggctagattgtgatgtttttataaaactaagttttctctatcatatttggaacactctacaaacaaagccaggatttaaagacacagtgatctatttaaagtgaataatgattttataagggaataaaaaaataaaagaaacttgaaattattcgggttttttttggataatataaaatatttactgatgttgatgctgaggttaccaggatctctgtcctcaggtcatttcaaagtggaaaattggaaactgatagtaatgtggacatctcctttattgaagcaatccttattttttattaaactacctcttattaaagcagcttaaatacagtcccaggaaaggatgagtttccctcattttggttggaggccatatctttagagtgtttttttacttgaaattaaggaactttcgtcatgagaaccaaggtcagacaatgagggtgttcggtcaaaaggtttgttaagttctattaatagttctaccatatttgagggattctaagctttctgagctttactttccacatttttccagttgtgttaagatttctaacttcaagagagtatataacttcaaaagagtatgtaaaaatacttggtaaatggtgaaacagtaagtggatgctgggtgcctttattgtgagagctttgagaagtgtgtcaggtcaggggtaaatagcccctgcttttagagcagagtggtgactttcatttctcattactgcagaaggtccagcatctcttgcctaatgagaatgtcatcctcctggtctccaggtcaggccgttgagttctctctgatgtgtctttgaaacttgctggcagtcttgtagcattttagaatatgctggatcaaactttatcctttcagaaaaaaaaaaccaaaaaaaaaaaactaattgattgcagacacaaggaccaaagcaatttttgtaactgttcattagtaccgacacttgggaaaaccaaggatttgtctaacaaggggcagggaacttagttaaagaagctccattttctctctctttttccccagcctgcggatatggtttgaattagaagttaaagaaatttgctaaaatgaaacaccatgtgaactctttggaatcgcttcacatccaactctctgacctttgatatcctttctattgcctctgggccttgttagagtgagggatgtttttcagtttctatataagcaatggaagcaaacatgttttaaaataatgcaataaaagcacccatcttatgaaagggacaattatttgaagactgttgaccttacaagaattggacaaggatttggcatcttgaaagtgtgctttgatactgaagagttgttctagaaatgccactatgtcattactctgtcagttactcttcaagacacaatagtaatgcattgttttaaatcttgcttggcccatctgaatgtggctttcattttttcatttttggaaatgtatttcaggaaggatatatatggttattaaataacatttatatttcataggagctcaaataatgtttaatcaaatgtttattaatgtaaactaagaaggcatcacagagataaaactaatataagctaagaaaacatcagataaattacagtttcaggatctgtattttacagacaaggatactaagactcagagggttaaggggcttcctcaaggtcacacacctagttgggacagagctggggctggaatgtaggtcttccatctccgattgcccttctctttccattccagcatgctatatagctcatattaatttaatattaattgtggaaatagtgtaatatataatcaaaggcagactcatttttaaaaatggttaatttacttataaaactataaactttgtatttttctgattcacttttccaatgtcacattagatttatttcaagttgtgtgaatgttattgctggtatttctgatgtgaatgaaatagactcaattccactctccctgctggtctatcagaaaaagccaaagacagcatctaatatttacacctagttttaatgtgcagcctcacttacataaaccaatttgcacagtaaatttcccattattttaagtaatagttaattagtaatgccaaacctgaggaggaggggcctgaaaaggtgacacttttaatataagttaactgagattaaggattttatttccttttcctttcagactggatgtatttttgtgcataaaaaagacaaagaggaagaaaggtttagagattttgaaaataatgtgcatgtataaaaaaattaaatcaacctccccaaacctcgaattccatgtgatttttttctcactatctctattttattagttccatctctgtacttactttaagcttttggacttcaggtggaacaattttgggcgcataaggagataaatgaccttgtgtgagatttgagatttatgtaggtgacatttttttgactaaaggttactttcagatcatggggcagtacccctgtgtggatgaacatatgaagactgttgatttcggatatccttaagcttgaaaacttgaggaagaatgttttattttctccttctatggtctgagctcagttctaatatgcatggtcttaggctttatcctcttcttatgactcctgtataataatagcaaagatctatttataaaagtagcttggagaatttttaaatacaaggaattttgattaaattgaagagctcgttgtgtgtgtatgtttattttaatgagaaaatagttttaaaataaagaatgcctccagtccttgaatttatgcctgctcctttccaaagcactttgcccatttttgtgaagtctcattttacaatcctcaggcttactccatactcacgccggaggcaaccttcagagagcttattcaagtgaagataaaataaaaatctttcctttgaaatagtccaataataaggcaaaatcaggcttctaaaaagagatttccctcttgacatatatgattcatgttggcgatgttttgcctgataattgtggcaggcagtccaagggcaaatgaagggcaaagtacagagggctgggcataagagacaggaggaccttatgggctgcccagaggtctcctctaaagagacagtctctagggataagaacatcacgcacctcatgaggacatgtccaggatcaagccccaccagtgaggacctaggtgccaatctgaacagcccttactaagggacagtgatcagagagggtctaaggagaacagaggttcaggccatagaggtggtgtggttggaatgtttattctagaaattattcataggcacaatcgaggctgtcaaacttggtaaagaatggaaactcattctacaggcctggttttagcctgcagcaggcaggcagcagggtatgagtggagaacaaaacactgtgaacagcatttcaggatactggagagaggagcaggtatacacagaaatggtactaaagtgtgcatttgggctgggcacagtggctcacacctgtaatctcagcactttggaaggcaaaggcaggtggatcacctgaggtcaggagtttgagactagcctggccaacatggcgaaaccctgtctctactaaaaactcaaaaattatccgagtgtggtggtacacacgtgtaatcccagcagctcaggaggctgaggcaggagaatcgcttgaacccaggaagcagaggttgcagtgaggccagatcgtgccactgcactccaccctgggtgacagagtgagattcaagaaagaaagaaagaaagaaaaagagagagagacacccagagagagacagagacagagacacagacagaagtaaggaaagaatggaatggaatggaatggaaaggaaaggaaaggggaaagggaaagaagaatgaaggaaggaaggatggaaggaaggaaggaagggaagaaagaaagggaaggaaagggaaggaaagggaagggaaggaagggaaagaaagaagtcactgcgctccagcctgggtgacagagacagactgtcagaaagagaggaagagaggaatgaaggaaggaaggaaggaaagggaaggaaagggaaggaaaggaaagggaagggaagggaagggaagaagtcactgcactccagcctgggtgacagagagagactctgtcagaaagagagaaagaggacgagaggaaggaaggaaggaaggaaggaaagaaagaaggaaggattaagtgtgtgtttgtgtaagagaagagtccattgtcctttctgccttgatttgttttgggggttggttgggagctcctccacagagtaaaatattcattcattcattcattcattcattcattgtttactgctatatgctggacactatagtagcaagcaaggccccagccttcacagaggtcatcatgtagtgatgatacagataaacaaatagctgtttaccaggtagggtggtgagttcttcaaagggggaagcacaaggtgcttaaatgaaaatacagagtggtgcctggcccagtttctttaaataataaccagtaagtttaggggagtaaataaccagtaagtaaataaccagtaagttagtgaatgagaagaaaagagaaatgtgcaaaatgctcagtaccggggggcaaggaatcaattctgataaatacagagaggagaatgtaaaaggaaaggtggtgagggaagatgctgctttccagtgcagctgagggcacgtttcttctagaatccttgtgttttaacataatctttctcctcagctcatttgtcaattgcagttccttaaatttaaaggaatttgctggttgactcttacccaatattttttcctgagttcttaggagaaatattagcattcatagcttgtagttaacagggagcataaaggtttgggccaaaagaggtaactgcttgaagttatttaagtgactgtgaagtctgcactgcagattaaagggatgttgtgttggctgagggtttggttatgactcagtcaccctttatttactttcttcaagttgcctgtcattcttaactggtttcttcttacttaactcttaaggatgaagcttgaaaaaaaatggttgagaaaattaccatttacttcaggctctcagtatctactcttggtcttggatggaaagcaagtactggccttcagagtctccataggcttggttgtccatggacttcctgagaaaagcgtgcattctagacaaatggactgtctttcttacccaagctttagttccgaatacctagccagcttcttttcctggtaaattgggctgggctggataaggatttaaagaccattttcctcttcccccttttttcctttttgctggagacttgatctaaggctgttttctcaaaccttagcttacattgcaatcacctggctagctggatacaccgtggattcctggaccccaccagcagactttctgatttaggtctggatgggggttgagattttgcatttctaagaagtcccaggtgatgtctgctgtcggggtaccatactttaagaaccaataatctaaggcaaatccagggacctaaagattctctagtctttcccctatgctcccagcttgagttcccatcttggctaaaaagaaataactcaaagagtattcctgcaaagaagaaacttaagctgaggaagaggtcaacctaagcctccattctcatagtccccactctggaaccccaggactttttaaagactagggtcctctgtgaccaggaagccctgggttaagaaccccttgaaagatccaggagagaccagtatggaatctgtgacctctacctaaaactatacttaatttgtgcatgtttcccttttgttttctatgttccaagaccttctcagaactactactgttagatcaaaaagggctgaactctccctgaaaattgttgcatatggctagcacctcctactaagggagaagttgttgctttcctgcgcggtaaagtatagacatccaccatgtattctgttagttctgtacttgaaaacagtgacaagttctacttttgagagagggaaaaaactgctactatacagtctttcatttacaaatatcccagggtgctctaatcctcttatttctcagaacttttatattctttagggctgatgataactctgtttatgttaaattctcagtagtaataaaataccctctgctctttgctgcccttagtaagaacagaaatactttatttcagaggcataaaagataagaaacaagatgacttttgtataaggtgtaaggaagggatccagtttcagctttctacatatggctagccagttttcccagcaccatttattaaatagggaatcctttccccatttcttgtttttgtcaggtttgtcaaggatcagatggttgtagatatgcggcattatttctgagggctctgttctgttctgttggtctacatctctgttttggtaccagtaccatgctgttttggttactgtagccttgtagtacagtttgaactcaggtagcgtgatgcctccagctttgttcttttggcttagacctaaaaccataaaaactgtagaagaaaacctaggcagtaccattcaggacataggcatgggcaaggacttcatgtctaaaacaccaaaagcaatggcaacaaaagccaaaattgacaaatgggatctaattaaactaaagagcttctgcacagcaaaagaaactagcatcaaagtgaacaggcaacctacagaatgggagaaaatttttgcaatctgctcatctgacaaagagctaatatccagaatctacaacgaactcaaacaaatctataagaaaaaaacaaacagccccatcaaaaagtgggcgaaggatgtgaacagacacttctcaaaagacgacatttatgcagccaaaaaacacatgaaaaaatgctcatcatccctggccatcagagaaatgcaaatcaaaaccacaattgagataccatctcacaccagttagaatggcgaccattaaaaagtcaggaaacaacaggtgctggagaggatgtggagaaataggaacacttttacactgttgtgggactgtaaactagttcaaccattgtggaagtcagtgtggcgattcctcagggatctagaactagaaataccatttgacacagcaatcccattactgggtatatacccaaaggattataaatcatgctgctataaagacacatgcacacgtatgtttattgtggcactattcacaatagcaaagacttggaaccaacccaaatgtccaacaatgatagactggattaagaaaatgtggcacatatacaccatggaatactatgcagccataaaaaaggatgagttcatgtcctttgtagggacatggatgaagctggaaaccatcattttcaacaaactattgcaaggacaaaaaaccaaacaccgcatgttctcacttataggtgggaattgaacaatgagaacacatggacacaggaaggggaacatcacacacaggggcctgttgtggggttgggggagggggaagggatagcattaggagatatacctaatgttaaatgacaagttgatgggtgcagcacaccaacatggcacatgtatacatatgtaactaacctgcacgttgtgcacatgtaccctaaaacttaaagtataataataacaaaaaagaaacaagatgacttttactctggagcatatttataatatgtcaaaaacaaattctactaaaatagatttattattcatgaaagagaaaaacccagttagattatatattcctttcctcaggcttctatagcccgcacccccccccacaccatatatatatttttttgctaaaggttgatatatcttgcatgctatcaaaaaaatttctttctagcggtcacttctgtaattcactactataaaaatgattaatatgtgtgtacacgtgttctcactcataagtgggagccaagctatgaagatgcaaagggataggaataatatggtggactctggggactcaggggaaagggtcagagtggggtgagggataaaagattacacattgggtacaatgtatactgcttgggtgatgggtgcacaaaatctcagtaatcaccactaaataacttattcaggtaaccaaacaccacctgttctccagaaacctattgaaatttaaaaaagattaatatacaaactatcttctgtttctgaaagatcaaaatactgttaagccaggggtggatttactaagcacttaagaacatgacccctcagaggacatcacgtgtagataggccccacttctgccactgagccctcctgtaccattattgctccctagcttgaaccattctaaagttgaatgacaagggattatcaggctggaaaacctcagtcatggacaactatgtacttttaatacgatttcagctccttgatgtgttctagaggattttggagggctggcataggaactcagatgtcatttccaagggaattgctacaggcaaacaaccaacatccaaacaatcttttgaaacagctcagttattctcttaggaagttgttatacttcgttgtattctaatttctttgaaactgattattgcagattgaattaaattgccagggctcagaacacaatacctgaaaacatggcaccttgacatactgagtattttgagataaaggaaattgagaaaactgcagaagctggaaggtcaatctctgaccttctttcctgagacaccttcatgtgacaggtgtcccactttatgcctggagggaaggaatgataacacaaagataccaagaagaatgtgaagagacctttctcagttccccccagttcaagaccattatatcgtacccacttttgtctaatcatgcttctatatgactatccattctttatcaaaactaaacatagaaatatacgattatctcaatttctgtctttgtttctgaaggctcctgtgtcacataaaacttacattaaataaatttgtatgtctctcttgttaacctgtcttttgttatagagggtctcagacatgaactttgtgatggatgaggaaagatattactttttcttccctagaatatattgacagttattcattatatttaaattaagctggatctctaaatactccaggcaactaagcatattttagacatgttttgtaaaatcctgatagattgaaacctataacacgatcacaaatgtcatctaatacatttataaacctggatcttcaccccaggtaactaaacatattttagacatgttttttaaaatcttgatgtaatggaaccaatagcatgatcacaaatatcacctaataaatttataaaggcagtacactttaatatttttattcatctatttgtaattattaaattttaaggaagttacacttgcccctcaattatgattaatattgaggtacgagaggcagggacaaatagcgaatgcttgctttctgtttttattttattcctgtgcaatttgtgttcttttaatacactccaggaaattgtttttaatcatgtgatgctttataatagataaatcatagcaaaggccatagatttcttgtagcccagaattcattaaagtctaattccagtaccatcacaatcagttttttcccaaatataagtattgcagaggtttcagttaacgttcattttagtcagtatattaagtaactccttactaagtaatgaataaggatcagtcataactgggatgtgtgaaggctcccattgtacagggaaggttttaaattctgaaaggggagaacaacgttttacagctttatgtatttatctcttcctgttatttgttcttgccaggatttctgctagaaaacatagacattattttaagactaatttatatgaaaagaaacaagttttaaaattgtatcctccatttgctttagaaaatattttttctggaatataaaaattacagtcactatgaatattttaaaatacagggaagtattaaagaaaagaaaattctaaaattacatcagctagctgtaactactatttgttttggtatatgtcttgctagtttttcccgttgtaaaacagtgtacatatgtaagcaatatgtgtataatatataacataaaaatttggatcagactcgtgtaattttatagcctgtggttattttttttcttaactgtatgttaagagcatttgtctttgcttcacaagagttgtgaatatttttagaaactcttctaaatttgctattgttaagcaaataactattcctttaaagtactatttttaatgggtacagtatttaagtactagagtgtgtttaatcaattgcttagtgatgattatataaggccaatatttttctaccataaacagcacaacagtattcttgtgcatagattttgtacacatttacataggataaatcctacttgtacaattactagataaaagagtatggatatttcaaggctatagaaatgtattacaaaattcttttttaccagatatgccctcaccccatccatcaacagcattgcatattatcatatttttcttcctgtactctttgtatgttttttgaaaaggttatttaatggcttaataaaaatggaggtatttttgcaaatggggaagttatccctaatgatacaatatattaatgtcaaattagattcttactggaggtaaagccatttatttaaaagccctggatgatctgatgacagcttgttgatatgtttttagaaatataaggatatcttatttaaagattgaagagcaaggcactgaaatatgtgtgatagattcaactgatttacttgtggtcagtggaaattttatcccaactctctatgttctggaaaacaactttggttgtgccatcatgaggtcacttaaggtcatgggttatttggtttaatgggatttgtatggttggatggggaagggattaatttgttatggaaatttttttgtcataaggttgaagttaaaagttgcacttaataaaatttataactgagtcatggtgcatttattcacttgaaagctatatgttatcaagtagaagcaaatgctttttcagatgaattcattttttcacaaataggaataaaaaatgaagaacaccttgtttggcttcgggggagctgcaggatttgaagtttgtatttattgctgagatgcaaaattgttacaagacatttggaacctggggaagagtatgcagaaataatgtcattagtcctcaaaggggctttggaacagaaggacaggaatgatctgaattcatttctaggtgaagtttattctgtacttttctctctgtcttcctctgatgattcagttgaacacacatgttgaatgaccattcccttcaaatcagagcagtctgtactgcattccaaacttatttggcaactttttagttcttttaagaaaggtgttcagcttcagggggcccaatatatgcattttctgggctactataaaaaattagcacaaactagtggctgaaagtaaccaaaatttattctgtcacagttctcgaggccagacgtctgacatcaaggtattttcagggccacatttcctccaggctgtggggaagaacccattcctggcctatttcaccttctggtggctgccaactcttcttgaactgtggctacatcactctaatctctgcctccgtagtcgcatttcctcctcctcttctgcttgtgtcaaaacttcccctgctccccttttgtaaggacatttagggcccacctggatgatccagaataatctccccatctcaagatctttcgcttaatctcatctgctaagtccctttttgccctgtaaggtaacattcgcgagttgcagcagttaggaggtgggtatcttttgggggccatttattcagcctgccatacccaggtaccttagatatgcctggtttcacatactgccctctgttcactctctaccagaacgtgaggcacatgtccagagacaaaaaattccttgtgaaagtattgacctaaactggtctaggttgggggtggtggtgagggagggtgagcagcactgactctaaagttgatccagcacatctgagataggtggtctggtaattcctgaagaccaccttataggtctagcaaggaagacaagacagcaggtttaaagactcaggacagagtaggccaagaaaaccaaatctcttccttggttcaccccaaccgaatggatagaaggccatatttatgggtaatgcacatgtcctacttgaatatttggcccctcgacagcccacctcagcccccttgtgttcctcctaactctgccagtttcttattatcatctttaggaggagcttttgccacttgctctggaacaagaccttctaggactccccttctttcttgtcccccgcttccaaagtttcttgcagtccagggagtttttcctctgccctagtgcaatagctaatccgatccagttgcacaaggatttagaacaatgcgactatttaaaagccttctggcctccttccagtaactgctcaatgtgtttacactgcaagaggtttcaggctgtctattctttgacaatgtaaagtctcttccacttcccgtgttcctcaaagagaaggtggatcctttcctgtgggctctgcatggtgagatgatgccattctaggaggtggaggagacaattaaaccttgaaatatcttgtaagtgaggccttggaaggcaagctagagaatttgagaagaggaacttttggcatggtacaatcaaagcctttttttttttcaagccagttagttggctgtgggttgggatttgagataattgcaataagaatgtagttatagggtggccagttcctcccctcttttaaaaagaagtaactgtccctttaacattctctgcagtcactgggactataatgtgtaccttcgtttgttcccattttaaatcaattatctggatcaaactgtagtgaaacaggattggctgggtcaacattttctagtctgtaggtcatcattgtaccatgtgtgtaaaataacccagctagtgcccctgatgccaggccctaggaagttttccacagatagcacaaagaacagcctcgaccacagccaccagtttcaaattgggaacactcaggatactccaacatcattttgccagaatacttcttaccttgttctgaaccccaatgctatgaaggaataagcaatgaaatgaactttcacctccactgcagaagagattaaggtcaaaattaccctcctccttcacctccaaagttcttcatatagtgagactattgtgatgaaattagtacccaaggtagagatgaatattttagtagttaagaatagtagtgaggtctgagaaacatcatatactgggtactcatgttgattctaggagaaccagagttaaaccaatggaagatatgcaaactgtaaaaagctttttttttttatttttatttttgatataaactttttgtatccaaagcctcttactgatttaaaatgaaaccaaagggatgaattaaaagggatggttgtcaggagtgagacaatcatagaacacataaaattctgcagaaaagagatgttttgcccaccattcttcacagcctggcaaactgggatggccaccatgttgttttttaatctatttttcaagctaacacttagctccctgtagttggttattaaggggggtctgtgggtctatttttctctgcagatctgttttatagcatagaaggcatgaatgcacatcatctacctcagaagcttgtttctaagcttcttgggtagaagctatgtggttatgtgtgtacatacatgctatattcaccaagctatgcaaaaggtttcaaagtcaaacttatttcttctgtgtaactgatagaaggctttgtatacttcgattatcaactccacattccccctaccctcagcctttggtaaccactgttctgctctctgcttttatgagttcaactgttatagattccacatgtaagtgagcacatggatatttgtctttctgtatttggcttatttcacttagcataatgttctccagttccatccatgttgtcacaaatgacagaatttcttcccttttttaaggctgaataatatttcactgtgtataatacaccacattttctctatgcattcatttgttgtgggatacttgggttgattccataacttggatattgtgaatagtgctgcattgaacatgggagtgcagatatctctttgacctactgatttcagatctttccagtaaatacccagaagtgggattgctggatcatttagttcctcaaaaaactaaaattccatttttagttttttgaggcacctccatactgtttttgacaatggctgtagtaatttaagccaaatgtattttaactttgaaagatatatactttttatttagcttttaaaatattctgattaaagttatatacaatattctcttagaatattcacattctcattctttaattatatcccacttttcattgtaaatgttgtgagtttgtgctgcagccacctcctcctcctcatcctcccttctgcccccacctaaatctccctctctctgtgtctctcactcttgctctaagtacttgccaaatatatatccaattcagaaaacaattaacttttgcttttactgatcattgttttactatttttttttttttggctacatattacatatctaggttttggtttgtaatgctctcatcttttctttctaaaaagtttataatttctgcttaactcaagaatgattaaggggtgtatgtatgtgtgtgtgggggggtgtgaatgtttaatttccatgtatatagatgttgtacactctctgtcattaatttatatgtttccttgttgttgtcaatgagcatgaccacaatattttctgccttttgaaaaatgctgaaatttcctctagggcctaatcgtgatcggattttgagattgtcacatgtgtgtgggtagccagggtgcaaagagggaaagaaaaaaaaatgtatttagagagagaataaatatattaagagagagaataaatatcattaagtactgttatttaaattgtgttactttgagttatttaagttgttgtactaaattattaagtatgatattcagatcttcgagattcttacttgtcttcttattctgttattctgagaatcattgtctcctgtttgtgactttgctaatttctccgtgtactttgtcaattttcaaatgttgtgatgctgcgtgctcacatgcttagatattaatggcagttaatgtgatgtattattactctgcctctgctttttctcttgaagtctgtttgtctcatgttgttgttacacctgttttctttttttcttagcacgtgcctatggtatcttttttcattcctgcgttttcttttttattttcttttttttttaattttagttctatcttttttttaattatactttaagttttagggtacatgtgcacaacgagcaggttagttacatatgtatacatgtgccatgttggtgtgctgcacccagtaactcgtcatttaacattaggtatctctccaaatgctatcccgcccccctccccccaacatccctgcattttcaaacttcttagatagttttcaaaatatttctgtaaacaaccataattttacctaatccgaaaacatcttttataagtgaatttaaccaattcgtatttactatgcttagtgatgtgtcattttattttgtgtttcctacttataatatgttcctgtcttctctccattctttatctggttactttttaaaagaggctcgagtttcttttgctatttctcccctgctaatcatttgggagttatgtttttttaattttaattttctataggagaactcttaaattcatagcacccatatttaaacttctattttcctactgatgtctagagtttttagtatctctgttcccttcccaaaatggttttacttccctttgtctcatactttgttcctccaaccacttcactggccacaactcatatattgatataatctaggatttgggttggctaatttttaaatatattttttcttttctacttttttggcatagtacaataaaacttaagattaagcctattgtttctttttactttatttttcttaacattatttcccatctctctcttatttctctatttattttcccctgacagagtatataatacattaaatttttcagagtagattactaaatctttctgattacttacaagtctgtaaataactacatttttctcctaaaagttgaaacagtattgaacacagaattttaaatccaaatttattttccacagaacttcaaaattgtcttactgcatttagtgttgtggatgatgtacctgatatcagtctcatcgtcatttacctctagcttatcttttctcttcctgcatctttgagagatttcatcatttctgcatattttgtgtcttcagtgtcaccatgaggtatatttgggggtgtatatctttttcccccatttatactacgtggaatcagtggattttttcactttgaggactcaaatattcaggtttcagaaacgttcttctactgttactttatttccatccctccattgtctccatataaggttggtaaacctttcctttctattttctatatctctaactttttcacccaggctggagtgcagtgatgcaatctttgttcactgcaatccccgtctcctgggttcaagcaattctccctgccttagcctcccgagtagctgggattacaggtgcctgccatcacatccagctaatttttgtattttttagtagagatggggtttcgccatgttggccaggctggtcttgaactcctgacctcaggtgatccaccccctccccccaccccggcctctcaaaatgctgggattacaggcgtgagccactgagcccggcgtggtgttgcatttttaagaatcccttggctcaacacttcatctgagttttctttacaattcagctcatctattaagttttatttcaacaatcttgttttaaatttctagtatctgtggttaattatattttaggaacagaatatactctctcttccctctgaaaaaatcagtatgctgaagtcaggtcctgtttttcctgctcaccctctttccttgggtgtaagttttacttgatgtgtttggtgttcttccatgttctttgcattgcttaactatttggtgactcattgttgtatgctcccctgtcatgcaagatgtttgggttgtagttattgcatacataccatggtgcatgttgccaacaaggatgggtaaaaggaacgctgagttcttcctagttgcagggagccactctgaacagtgcctagcctctctttaaatgtcctactcactgtctataataaaactgttgcaggacttttccttagttcagctaaaaacagggttctttgtcccacagccatgaaaattcaagctcacaggcaatttaaatggcgagtaagacagggtttcattgggtaaaaaggaagaaaatggggcaacagggactcttgcaagcccagaatccctgctagagggcttcattctaggccactggaatcccaagttccacacagaaggaggaggggccagactcctctctgctacaaacattgtgaacaccccgaggccccacctcagtgggcaggctggttggagtttctccagggaccccctatgagctggctgtctcaaaatcagaagttctcttgttccccacgtggcccaaggggtgaggaacaaaggggtaggggaaagggagcctaagagagggctaaagagaggaccaagagctataaaaaattctggctattcctacgtgattctgcaacttataccctgtgggctcctcctgcccatatgttcaccttcaagcccatagtgcccttagctatttacagcaggcctctcttatgtattgattttggtctacggtttccttattttatctggtgccttcagattttaaaaaaagaatacacacacacacacacacacacacacacacacacacacacacacacacacacatcttgttattttgtaggatttggagagggaatggaaacttcccaaatgatcacctctggtatttcttgattatgatatctccaggtttagagaaaagaaagcaagttgggggtcagacaaagggaagaagaaaaaaacgtattccacatatttaaagtaaatcttctgcaaacacagaaatgcgaagtgattaaccatcctcaattgttttttcattttatatactaacgagctattctttttcatttttaggtcttgaatataatcatggccaaaccttatgaatttaactggcagaaggaagttccctcctttttgcaagaaggagcagtttttgacagatacgaggaggtaaagaagtgttattaatcttttctctcaaaacattctaataattattaaattttaattacagtattgagtaaatattctttgacataagtaagaacatctttaggatttataggttggagttgttgaaaagaggcaagttatgagctagagtaataatgataatgatactataaatttttgagcgctcactatgtgccagatgaccttctaaacattttatgtgtattatttgtttaattttttacaacaaccttacaaggttgttgctattaatattctcagtttacagatgggttttatatagtaacagtttttgcttaatgcagtgcttttggcagtcattctacatttaactttgtatgtgttataaatgtaatagtgattgaactttgtgccagtcattgctttgctcatttcattgatataaaccattttgaccaaagctttgcatgcctctgattctatcatttattgtctgtgcccttgcaaggtggtgatgactccagactttctatagagcaggggctttgggccaccaatctgttcagaatggctgggtaggtgaattaaagcctcatttgcattgtaaatgcatgatttttcttctgttgtacttgaatttgaggtgacttgggaaggagtgtataatgaaattgatgtttcctttaccaagaagttgaaagtaaaacatattaaaacttcatttagagtcagagttggttcctttcaaaatcaatgaaatgtatgaagtggctaattcgctgatcttcccagagatccagattgtcagatgcagaaactaggtcttctgtgagctgacatagcttaatacttgttgacttgatatttctgcagggtgcatctctagatttacaggatagtcactttttaagtaaacaaaattgcaaatgctaaggatggacctaaacatggttactattccttgtttgaattaaaatattgaagtaatagctgttcatatgtctgaaattaaaataacagtgaactgcattctgctataagatgaaacagaataatattctgccatccagagacaagcactgttaattcttatgcagttttcttctagtcttttttcatatttgtttttcttttttttctctctcccatggttgagatcatagagtaatatttttaaaatataaagcagatcccatttctcctgtgtttaaaatgcttccatcacttcccattgtagcgtaaagggaagttcacagaatgaaatacaaggccttctataatttggctcctgcttaattacctcaccttcatttctctccagtttccaacatacagcgtatgttcaactatagcaaaccacttacagtttcccccataaactattctactacatggtttgtttatgctactccctcttcctgaaatgtatttattccaactggtttgattggtgaactcctctcatctcagaacccagatgagaaatgtccacttctgtgatatcttccttgacccattgaatgaataagaggcgataacttattttttgccaccactaacctatccttgcatattttacactgccttcacattttatttaatgtttctttctctccaactatgttctgagtttcttgaagtcagggatcatattttacttatctttttctctccagggactagcagaatacctgtaaccaccaaattctttgtggatgtctagcatctaaaatgattttagatccagttgattccaattcagactaataattcagagaaggtaattttgaagagattacatgcaatcattggttcagtatatctcctactgttatgtaagaaaaagctattggagaaaaaagtacttgacaacagtgaaatgtgatttgatgaaccagagattcatttgaatccttcttattgcttgtgttttttttgattattaatcatcacagctcatattaggaaatactgatcacctgtgcttctaaaggcatttgcttttcctctggattcctctacaaactaggcaaagttagaagaaaagaacccttgaacaagtattaaataaaatgtaactaagctttcaactctttcaagtgctattttactaggattttgagcaaaaacattttaactttataaagcaaacatgcgtcttcatgataacataccaaaccacaaagctgaagaatatttcaagctggatgacagccagtttaaaaaataattatttcccactcctataagactcagttctttagagccagagccatgaaaacatttaaggcaacaacatgtaagcagaaaaggttcgtttctatggttggtacatgaacagccatgagggattacagctgaaagccagtgcgaggaataagattagagaaacaaaacccaagcatccctaaagtgtcatagcaaaggtaccttttgtgaaggggcataaatgctgtcagcaccatatgataactaacgttatcatcatgaactcaaatagcaggtaaacataaaattgtattccatgtatttgtttaaagaaagcagctgggcacagtgtcttatgcctgtaatcccagcactttgggaggccagggtgggcagatcagtaggtcaggagattgagaccattctggctaacacagtgaaaccccatttctactaaaaatataaaaaaaaatagccaggtgtggtggcacatgcctatagtcccagctacttgggaggctgaggcaggagaatcgcttgaacccaagaggcagagggtgcagtgagccaagatcacgcccccacacaccaacctgggtgacaaagtgatgctgtgtctcaaaaaataaaaaaaaataaataaaaaaagggagcagggagtaagcagtcagtaggtgggggaaaaatgtttaataggcactgttttaaaaatagtcaataaatgtagtaagtgcaaatgcatttaaagtttattttattatttctgcattactgaagaattatttttgaggcagccagatttttacaaatgacctaagtggtaggctgtgattgtattgccatgacacttctaattctgtacttttctaactttacttgacttacacgttacttaaatgcaaaatatattttgtttcctaagtgatgcttaacattaaatctttaaaagacagattcgtctcttgtggaggagagaaatagcagtgtttttaaaaatacatgcaacccagatatctctaactcaaccagccccctgactttcctataatatccacatcaaagatctgaagaacccattccctggcaggtcagggccttcccagtctttcctagaattcctaggtgcttacccacttttgatgatgacttatgtcctcaaatgcttggctaccattcagtttccaggactgttgactactccaatttgtttccttccctaaacccactttaacatcaaattccagaaatacaaggatgttgtataaagtagactttttactgaagatttagtggcagcagaggagaattgcatcatacaccacaccaagacaactttaagattaaaaatcggagatcatgctgaataagtttcattagccagcccaaccaggagtgtctctcttttttcttctttgtccctctcctccatcaagattcctgttcctgtttcctttattttattttaatcacactcagagtcctttttcacttttccagatacttttttcttaactgtcaaacattttctgtctctcaatctaaagaagaaaacttcaaaattcaagtccctcctcatcctggagctgtttggctcccctttcacctcaaactctcctactcagactctcctgagatcctcccttttgcataagcctgaaagtcaaagtatgtccttaaaacacacaaaatctaaaaagagctttattcttaagaaggagactgccatcatagataagtgttcaccaacagaactttccacaatgatagaaatggtctacatttgtgttgccgttatggcagccacatgtggctgttcagcatttgaaatgtggctactgggactgagggacttaagtttttaatcttacataatttaaattcaaattcatataggtacatgggcctagtggctttcttattggatggcatagataatcaactcaaactacaaccagattttaaaattccattctcccttcttgacactaagaagcattctcagtgcattccgttggaatctccagaattcatcagccagttcttcttaggggcagccagagcaggggttcaaatgttttatggatgactcacctcagccactgacctcgtctttcccacatcataaatcccagctcgggctaccccttcttcttgcccatgggactttcttgtatctgagtccagctgcctagatggagtcccttttcctagcaaagtcttggtcttcttggtctttatactagcctccccaccttccaccctacacacacacacacacacacacacacacacacacacacacacacgcacgcactcacacacacgtggtggaggaaaactgagacaattattgcaggtgtcaggatcaaaggagtatcaaagtgcagggtcaatacaaacctaaagtcaggcacagtgggacaggctgactttggcctctttccaaggtggttctgaaatcaaattgtgagcagccacaccatgaagctcagaaaagctcaagcagcctacaccccacaggctgttcatcagcaaagcaaagcgctttccaaatacaattttcaaaagacttaaaaacacaagcctcatataaagtattttgattaaaagatatatttaactaatcagggaggacattagcaggatgataaagctagttccaagagcacttgaggaagagaattttacgtaggaaaggaaaggaaaagtgaagtaagttttgtcaattagatacaaaactggctaatgtcctataaggcaataaaactctaacctattatagatttgcctttttctactggacacaagtcatctacatcattatagaataacagcagaaaaatgctatctattaaacttcgaagaatctatgtcccaaacaacagtaaatagtaggtcaaaccaaaaatacatttttctatagaagtaaatcattcttaggtatgcctcttcaatcatgctttgatgtaacaatgaaaagagggatggccatctttgcatattatttttaagcttgagataatttaaattcaattataaaacaatgtccagatatacctgtatttacactaaaagatacttacagtcatcaaaatgataataatcataataaattagtttttcaactgttataatcaacctattagtttttcaacttttataatcaacctaagggtagagaaaacatttaattatttttgaccaagcataacaaaaaagctgttacctttatctatttaaagtaagggtgccagacagatgctggaaattagaagggacttggagaaacagaggaaagtccagaggctttatactctcagcaagagggaaggttggtagttgatgtacaatagaggcttgcagatatgatttaaagtataaaagtagccaatcacaaaccaaaaataaaataatttcaaatttggagttgggggagaaaaagtagtgaaaatgcgttaagtggagttaaattgctgtgtttttattccaagaaaccgatttctgcatattcctggtggataattagtttagttactggctgtcttgccatgagtcctgttttcttaagctcctgtctctattagagttggacatatggaacagaaacctgttggtgccactttattatgcactgcagtaagtactggcttcatagtttggacggcagctgtactcaccgctataccaccaccaccactggctgggcttctcagttttaaactctaggctttcagcatgtggccctgaagccctttcactctcacccctccactttcttccacttgcatattgtgatgagaaaggtggtagaatgatctccttgtggtgtgagaggagaggaaggggcagcagggctgggggactggccccagaagcctcaatgaggaggcccgtttcaggctgagtcttgataggtgagtcagtcaaccactcaaagcacagctaagaggaagggagaggccagggcttctgcaagggcatgagtatgacagcacattctattgagggggtaaggggattattcagctagggcagagggtagggcagtggagtacaggggtgaaggcacagagatggccagtgtccacaccatcaatgggtttactttccagcccagggcattggcatttgattcagaaagctctagggaacctttgatggggtttcagcagggcagtgatcagttctggatgaccagtgacaagtggatgtggctggattccttgtgggagtggtctggagggtagtgttgggcttgaaggacttaatggacagtcagtcacacatatggagaaatacgggaggattttgagtgtaggaataaatgagaagatttttctaacctggtggatgtagagtatgtgagagaataagtgtagaatgaggttggaatttctagcacgggaactggacagctctgatgcaaggtggagagaatgccagagaagggggtacatgtatggatgcatttatattgtttctttctgaaatgacgaagaaccaaaagcaaaagtgatatcttctgtagtacctaagaagcattttgtatataatcacattaatactagttaaaaatacattgaatagaaagggaagaacgtaataaatgatccaagaggatgaacacatgggcgcatcttcctctctcagtcctcttctctcagggtgattgttgctgcctgatgggatgaaggaatgaggaccccaagaccctcacagccacaggcttccttcactcaccctcttatgtgggtgatactgcattcctcagggtagaggaattttttttttttttttgagacggaatttcgtgcttgttacccaagctggagtgcaatggcacaatctcggctcactgcaacctccgcctcctgggttcaagcaattctcctgcctcagcctcccaagtatctgggattacaagcatgtgccaccatgcccggctaacttttgtatttttagtagagatgtggtgaaaccccgtctacataaacagaaagtctatttacacagaaaggtttgaggaaaaagaacctctgacagaatattctgaattataattaggggtaagatcgtaaatgtgtatacttatatgagtctttcacacactctgtatattgtatgtgaattatcatattggaatcattaggctacaacaagctatatagcaacttaatgatgataaacaatcttgagtacagttggccctttaacaattcggaaatattttaaagacattacaacttaatccatggtgcgaaccactgctctagaaggctgagataaagcaatgaacaagacaaacaaagtctcagtcctttgggagtgtatggtccagcggcaggagaccaacaataaaccaataagcatagaaatgaatggcttccagcagtgttcaatactcttatgttactaaaaggagtgatagagggatcagagagacaggcagacattgaggagtaggggaggggacattgctgtgggttgggtggtcagggcaggccctattcaggaggtggcatttgaagttgtagctgaatgataagaagtagctagattggccaggtgcggtggctcacacctataatcccagcactttggtaggctgaggcgggcacatcacctgagatcaggagttcgagaccagcctggtcaacatggcaaaatcccatctctactaaaaatataaaaattagccaggcatggtggtgcgcgcctgtagtcccagcaactcaggaggctaaggcacaaaaatcgcttgaacctggaaggcagaggttgcggtgagctgaaattgcaccactacactccagcactccagcctgggtgacagagcgagattctgtctaaaaaaaaattaaaaaaaaagagccagtttggccaagaactaagggaaaagcattccaagacatggaaacagcaaatgctaggctctgaggcaaacatagtcttggcatgtcgaaagaagagcaccaagggtggagtgagcatcatggtcagggcatggtaagaggagaattctgagaagcaggcagaagcccctcatgtggagcagtagttctctcaaagtgtggtccccaagccagcatcatcagcaccacccagaaccttattagagatgcgcattctcaggcccatcccacggacctatggaatcagaaactccaggaactggcccaggcgtatgtgcattaacaagcccttcaaggaagtccggtgcacacttaagtacgagaataaatggtgtagaaccaggccgaggtgtttggatttcgttctgattgctatgggaagccattttcaacagggactggcatgatctgatttatattttggagacagttactctggaggccgtacaaaggatgattcgtaggcgggggccaaaaggttggagaagaccaggactttaaggaaggtgagctagaggcttaatccttccttttcctgactatgtctccatgggcgattttcttaatatctctgtgccagaaaaataggatatgttaaggtggatgggtcgaagaatatcagttgttctccttaggattctacgagtctgcacacacttttcttgtcagcacagctgtgtgacttcttcctgatgtgagaagaaagccaaggccaggcatctgagcaccacctcagttggcccgaacactgaaacaacccaaagcagcaaaaactaagatcagccagatttttgcaaagaaaaacccaaaacaacattcaggcctgttccttcctctagaccagcctttgaaataacagtgctgataatattatctggtctctcatgctcccaaagctcagagctcattgtcatccaagcatgagacctttaaggaaaggtctgtattgtaggtcatctcatgctgaaaagtcatagaactgggtcagcatactttttctgtaagggaccacatattaaatagtttagattttatgagtcctgcagcctctgttacagctattcaactttgtcattgtagcccaatagcagccatagaacataatatgtaaaaaaatgagcaggcacttggattagaagacaaacaatgccacatagaaatgagtaacaaattggttttgatggtaatggtagtaatgaaataattctagtttcaagtaattatttttactcctcgtgttcttttactactgtgttgtatttttaatttagtcaccctctatttctcttccttatcttgatagatcattgtatcagtttatcaccttttgctgcatacataacagactgctcacctttcttttctaagatgctctcatttttgtggggtagggcaggggcttgctcttctcattttcatgtctcttccctctctgaagtttctttgggcttgcttttatttcttcacaaaagtagaagataactctatttcctggaggaatggaagcatctcccccatgaaatagtgtctcagtcagtttcatggaaaatggtaatccttgagatccatgcttcaaggatgcaagaaggacgtcttattcatggaaaaatgtgagatgcatccattaggaaactagacagggaaatctggggtcccactagatttacaaggagcttgtggaaacaacacaagacaggaagaaagtatggaaaaaatatgggcaattaaattaaaatataagtgtaagcacctaggggttcttgctgccagctgcacaaagaaagaacatggcattgtagtaaagaaagagtttgggcaggcgtggtggctcacgcctgtaatcccaacactttgggaggcaaagatgggcagatcacttgaggtcaggagttggagaccggcctggccaacatggtgaaaccctgcctttactaaaaatacaaaaattagctgggcttggttgcaggcacctgtaatcccagctgaaaatacaaaaattagctgggcttggttgcaggcacctgtaatcccagctgctcgggaggctgaagcagaagaatcacttgaaccctgggacacagattgcagtgagcccagattgcgctattgcactccagcctgggtgacagtgacagagtaagattctgtctcaaaaaaaaaataaataaaaataaaagagtttaatagagacaaggccagccacaccacttgagagatgagttagtattcaagtcatcttgtccaaagctgctagtttaggggttttttaaaggcagtttgagggaagaggaggtgcggggtctaggcttctgctgattggatggggcagggatgaaatcatgctgaatcgcttctgggtggggccataggagtggggttggcaagtccaggtgggtccaggtggagacatgggtgtgaggcatgcaaaaaaaacctgaaaagatatctcaaaaggccagtcttagtttctacaatggcaatgttatttgcagaagtaactggggacattgcatgtcttctaacatccagaataatggctgacagtcatatatgtctgcaccttagcaggactcaggccctcctctcaaacagaagtggttggtttttgggcaatgcctgttatcatttaaactgtagcctaaacatctcccaaagttaccttcatccaaaagcccaggaataattaaggaaaaggcaaggtgggaggtgggttagcttagctaactgttataatttttctcactgatacaatttttgcaaaggcagtttcataaggaactagctgaggatctacttaggtctctcaagtactactgtactatgctaaagaattaaacacaatggctaaaattacagtgctgattctctattgcttcttctcaacctgcagtataaagagaaaaatgctcaatattagctacctcaagccgtgtctgtgggccgcaggtgaacaggagggtgttggccagggcatccttttaattagggttgatgagtgcagtcttgcagatcatcaggctagtggtgaagagaccctaaggacatcctggtttcattctctttgcacacctctttggaattgcactctcttaatgcatgtggtgtagccattgaattaacagagttcattcaagtgtggacaaatgaacagtcagatgaaatatacagcacatgttaaaatgaattcttttttctgttgagcagtctagggagaagaaatttttttaaaaaatcaagttaataattttgaagtcccttctcgattgataaaattgcacttctttaaacctgtgcaatttcatgccactgaattccctattcctgaaaattttcagaaattatttttgtcattacttgttttggttgtttttgagagggtgctgtattagtgagggttctccagagaaacagagccaatgggatatatagagatatataggtaggaagagatttattatgaaggattggcttacacaattatgaaggctgagaaatcttatatcgtctgtctataagctagaggcctaggaaaacgagtagggcagttccagttcaaacctgaagggccagagaaccaggggagccaatggtgtgtaagtgtcagttgagtccaaaggccccagaaccaggggcatcagtatccaagttgaatgtcccagatcaagacagagtgaattcattcttcctccaccattttgttcagttcaagccctccgtggattggatggtgccctcctgtattcggcagatcttctttattcattccatcaattcaaacacaaatctcttccagaaacagcctcacagacacacccggaagtaatatttcatcagccatcagccttagcccagtcaagttgacatataaaattaatcatgacaggtgttttttagcacagacagtagtaaatcactactactttgagcactcactaggtgctggaccttgcacttgacaaatggtataaatgatcaggaaagtatcctgatctagaccctaagagagaggattcttggatctcgcccaagaaagaattagaggtgagtgcacagagtaaagtgaaagcaagtttattaagaaagtaaagaaacagaagaatcgctattccataaacagagcagccctgacagatgctggttagctatttttatggttatttcttgatcatatgctaaacaagtggtggattattcatgagttttccaggaaaggggaagtaattcctggaactgagggttcctcccctttttagactatatagggtaacttccggacattgccgtggcatttgtaaactgtcaaggcagtggtaagaatgtcttttagcatgctaatgcattcatatgaacatataatgagcagtgaagacaaccagaggtcactttcttctagccatcctagttttggcagcttttggccggcttccttagtgcatcctgttttatcagtggggtctttgtaacctgtgtcttgtgctgacctcctctctcatcctgtaactaagaatgcctaacctcctgggaatgtagcctagtaggtctcagcctcgttttacccagccctgttcaagatggagtggttctggctccagtgcctctgatttaagcattatttcacttaagcctcgaaacaaccctgttttaagtaggtctttttagcttccttttgcagtttacaaaactgaggattaaaatggttaagcatgttgcttgaggtttcacaggctggttacagacttagcagaaaaatggcctgccagctagcctacagtggatctccaagtatggtttcagacagcatcagcaacatttgtgagcttgctagaaatgcagattattaggccccaccccagacctacagaatcagaaactctggggggagggtccagcaatctgtgttttaagagccctctcagtgattctgatgatgcagctcaagtttgagaacctaggcctagggaaaggtaaggaattgtagacttactagaaggaaacaaaattagatccatttaaagttctttacagctaatcttcctcaaacaggcaacacagagaaaagggtgaagactgttgaataaaagagacttctttatctaggctgaacatattagatttattgaacccttgacacagtgcaaagtacttgacatcagtcatctctttaaaccctcaggtggtggtgagggctaaatgagattttccacagtttacagatgaggaaagagaagcttaggtcacttaagaattgcttgttaatcaacatgtagtacgtgatggagctagcgtccagaactaatgtattgctaaagagaacatacacaggtcacacagctttatgacccagaatggctgtcagcagagaaacatgtttttgaagatatatatgatgtataaaatacataattaaaaagtctttctaaagttcattaataggctggaaccaaagacctgtttaactttttactcaccgtttgcattacttattctagaccataagtattatactactaagtctaggtgtctttagtctagttctcttagggaaatgagaatgggaagactgtatttttcatataatttcccccacattccccaaggaaagtgtttaccagggcttttttaggttttttgttttttgtttttttgagacagacggagtctcactgtgttaccaggctagagtgccgtggcatgctctgggctcactgaaacctctgccccccaagttcaagcgattcttctgcctcagcctcccaagtacctgggactacaggtgcgcaccaccatgcccagctaatttttgtatttttagtagagacggggtttcatcatgttggccaggctggtctcgaacttttgacctcatgatctgcctgcctcagcctcccaaagtgctggtattacaggcgtgagagccactatgcctggcctttcttttttttctttttctttttttttttttgatacaggacctcactctgtcacctaggctggagtgcaatggcacaatcatagcttactgcaacctctaactcctgggcttaagcaattctcctgcctcagcctccctcccgagtagctgagattacaggcagagccaccacacccaggtaattttttttttttttttttttttgtagagacagggtctcactatgttgaccaggcaggtcttgaactactgggctcaagtgagcctcctgctttggtctcccagagtactgggattataggcatgagccactgtgcctggcccctagtctttaatttttgaggggggagaaaaactaggtaaaacatactatatggaaagattataatattttctttcaattgatggacatagacataaaatattgtcagcgagaaagcctatctttttaatatttattttgataaactaacaaggagcatataatttataaaatactttctcttaaagccataaatagtaagcacttgctccgaaatgctgctttgtcaagaacgttaattgaagcagatgagcagagtcagtatagcttcccaggtccagcctgcattccctttctactgcagagttacgctgaggacagcatgctggcacctccacggctcttctgctgtcaacttttcttctcccaagtacctgaaagggcaggtgatcctcttaactttgtagacatgtgaaaaggagactagtttttgaatgctcaccaaaagccaagttgccaggatattgtttgcaaatacagaaagggtttttgtactaagtggtatttaaggcaaaatctttgccaaagaactctatccaaaagcttgaaatacacatagttggttaagggaatgcatttggagttaaacagaaataggttcagttttggctttgctactcaagagatgtgaccatgagtcagtcttaacacccaccaagcactaagccagagcttccttgtttgaaaaatgggagtgataatacctacctcgcattgccatcataaggaataagtaagatggattttttaaaaatggaagtcagattatgcccttcttttggtttaaacctttaatgggtttctacctcattccaagtaatttccaaagttctttctgtgtcctgcaagtcccctacatgacctaccatttcgctgtcccattgatattccctgagcattctaggcacactctgacctcagggcctttacacttgctgttctccctctggactactctcctctgtacagtcctcatggttcacttcctcacttcattctgtttctgctaaaatatcacattctccaagaggccttcttactcacctacacacacaggctcctgacccttctggatgttttatttgttacatttatcactacctgataacttactcttttttgttcattgctgaagtccttctagaagataagccctgagagtagactttgtttcctgctgtatccccaccagggaattaattcatcactcaacatatttcataagtacctactatgatccagcaattccttagttacttatctgagactgaaattcattgatatttccatggttcctaatttttaaggaattttaaagccccaaagaactggaactgaaaatgtcactttggaatgtggagaaaggttaagccagagacactatctgtggcagctatggaggtgtgtcgcttaaatctcccttcaagagacagctgccccaggagtcccctcattggacagttttgctgcaggggcttcagcaccctcaaaatgtccctgcccaggctgtactgaacatggcaagctgctacaaccgggcctttcctgcccaagtgaggctcctctggtgggcgttctgtgctctgcagctgcaatccagcaatgttctcagctgtactgcaagctgagacaattcctccccagttctccctgctccctcctctcctctctcaggtgtttgttctgaggtctggtttggaggctctccctgtcactcggtttctctcccctttctctttcacaggcatttgccctaatgaattgctcacatttccaattctgtcttgcctgtaatctcagctactcaggagggaggctgaggcaggagaattgcttaagcccaggagttagaggttgcagtaagctatgattgtgccattgcactccagcctaggtgatagagtgaggtcctgtctcaaaaaaaaaaaaagaaagaaatttaaaaaagaaaggccaggcatagtggctctcacgcctggccaacatggtgaaaccctgtctctactaaaaatacaaaaattagctgggcatggtggcatgcacctgtagtcccaggtacttgggaggctgagggaggagaatcgcttgaactcgggaggcagaggttgcagtgagcccagatcatgccacagcactccagcctggtgacacagtgagactccgtctgtctcaaaaacaacaacaacaacaacaacaaatcctaaaaaagccctggtaaatactttccttggggaatgtgggggaaataatatgaaaaatacaatcttcccattctcatttccctaagaaatgtcttgggggtttgtttctagatggagaagcccttccctcagggtaagaggtcctcaggataagcctccaggactctgctgccatttcctgaggccgactctgagctcactgcagaattctctaggtggtagcagtggttcttgtgtgatgttccagtaattgctgcacttattttagacacaataaaaagtgacagagccagcattgaccctaagagccagtggggactatgtatcttcaaggcctaaatataagctatttcagaagacaaaagtccaactggagtgacgtatcatgcagctcttgtggaaaaaaaaaagcattttcaaaagctgcattatttaaatgagaaatgcatatatttaaagggaagttccataaaagtcatttgagattccttttctttcaatgactgtattcagcattgtctattatctccatatatcaatagtttaaaatattttttcatagacctgccttttcagaaacatcttctatgtcactgtatttttaattacttgctcagtgtaatttattatgctggaactaattgtgttttaattagaaatgctttgctaaagagaagaacttatcagtttgcggcggtgtttccggtgcaactacaaagcacgtctcctgtttttcttaggatttttttataaggggacagccacataatgtgtttttaatatttgttgtaaatatttattaagaatcctgtttacttgcctccataactctaagttgttcctctttaatttttccttattttagttgctaaggcaactgttttgactactgtgacagttttcctgcccaagaaagttactttgagtgaccacccactcctcttgaaaacacattttgctttctccttccttctgcactctgagaggtagttgttgaatattttaggaataatttcttcacctcttttctggcaagagtcagggaaccctcccagaatctgagcatccagattttgcctcacaatcctcacagcagagacacttcagggagggaaaattacaaacctagacagatccggagtgttcagccattcaaactggcctgcctcacaaatcaagtcccaaagatttaacatctatatcgtcaagtaaaagataaagtgggaatccctagctattagtgaccataaagtcaatcgttagaaacagtttggcctctcccaggtggctaatctgggcatttcatttctcccccagattcaatcatagttaagctgattaaattctcaaagaaccaaggatatttctgagaccttgtatctaagttctttcaggctgctataacaaaataccatacactcggcagctataaacaacacatttatccctcacacttctggaggctgcgatgcttaacatcaaggtgctggtagattcggtgtctgataagagcccatttcccgattccaagatgacacgttcttgctgtgtcttcacacggtgggtgaaaggggcagccgtctctctggattcttttataagggcactaatcccatttatctcccaaaggcccccacttcctaattccatcacatttgggattaggatttcagcataggaatttttggtggggtagagcacaaacattcagaccataggaccttggtaagcaccatcaggccaaattttattttattttttaaatatataatatgagagatcagaaaagatggtgtaccttcctttgtttcttttcaatagccttcatccactcttccaagccaggtcacttagaaagttgatgatgttctttattcctgaggtaagaataaaatgaaaggggtggattaaatctttctacttgacaccagaataagcgttctctgtatctcactgtcattgctggaatgagcactttaaatgctcatggttgattactgagggagagacgttttcatttttgttcctattggttttgaaatgaaagatagacagcaggtttaccaccttttgaagttgctgaataactcacttcattgccctcttgtcatctgagaacgtgctctgtcgtgtcagggaggtgcagggcagagtctccccaaccaggaatgacctcttctgttcactataccccaacatgcacttgaaaataaaaactgtgttgtgatggctcgtctgtggcagcagcttcttggcctgattgtagactgaggccagcttaggcagagtgggatggaggagttggagcaggaacaaacagaagatgaccttctgtgcagaaaccacattttcaacaagtctaagtcaacccagagttacgaactctgggtttcccttatgcttagctttgtattctagctcactggaaatagacatgcactaataccattgctctttttaaagatctgtgtaacagaaatggattccctgtcaaaatgtatttgtatttctgcctcatattatatattatctgcatcctcttgggtgacttgcctcacctcagttaggaaaagttttctcatctgtaaggtagggatggtggtgtttacctcatttgtctttgatggttaataataatcagtactagcaacattataatgattattattactatgttttatattaataatcaatactgggccaggtgcagtggctcatgcttatgatcccagtgctttgggaggctgaggcaggaggactgcttgaagccaggagttcgagttcagcctggacaacatagcgaaactctgtctctacaaaaaaaaatttttttttttaattagccagccatgatagtgaatgcctgtagtcctagctactcatgaggctgaggcaggaggattgcttgagcgcaggagtttgaggctgcggtgctatgattgtaccaggagtttgaagctggagtactatgattgtaccactgcactccagcccggatgacagcaaaattctgtctcttaaaaaaaaatcaatactggccgggcgcggtggctcccgcctgtagtctcagcactttgggtggccgaggtgggtggatcacgaggtcaggagattgagaccatcctggctaacacagacaaaccccatctctactaaaaatacaaaaaattagccagacgtggtggtgggcgcctgtagtcccagctactcgggaggctgaggcaggagtatggcgtgaacccagaaggcagaggttgcagtgagctgggatcatgcccctgcactccagcctgggtgacagagcgagactccatctcgaaaaaaaaataataataaaacaaaattaaaaaatcaatactaatttacttagttcagactatgtgtcaagtgctctaatgcccagaaataacctgtgagataggtattgtggttgatgttgttgtctctgtttttagagatgaagaaatgaatatctaaccacatttggatcaggttcatctaaaaccctaaagcctatgtaaaatacccaattgtttctgctgctggtgagttggtttttatgcttacatgtttctctcaccttccacaggaagctgtaatgtgaaatatgtaccaccagataaaataacggaagagggatttagattgaagggaaaaaagtaaacaagggagagtacatcaaatgaggggtaaatttagcaggcagcaactcaacaagcagcgaaaatgatctgtaaagttgaaagaggtgagcctcagatttgcttctggtgttcctggtggctaaagcaatgtagaaaacacaagttgttgtagggttcacagtgtccattagattgtaaggaaagcaacaggtcagtaggaacagagtttttcctggtcctaggatctgaaaaaaaattcttacagaattcttacaaaatacactcccccataaaaaactgtaataagtacagaatgtttcagtagtacagttgttcagttatctatgtggtaggattcacggggaatccataagaaatgcagtaattaaaaccaaaacacttcagaaacccatctgatcctttgtgatgattgctggcatcagtggcaaggagaatagcagaggcttcttcaggtatgactgctgagcagttacctgagccgactgctgagcagttacctgagcccactcctgaacactgtcagtctttcatgtgtcagcctcaaagcaggtgtagcatattgttcaaaacatttgatctgcatgcctcaatgtcctcacttgtaaaataggtataaatagtgaagcagcgttgtttgtctggggtaatacccgaggttcgttgtcccacagccatggaaagctaggacgtggacacatcagagtgaggttaagagtggaagtttaatagacaaaagaaagagaagagctctctgcacagaaagggctcctggagaaaatgggttgccacttccgcagtgaaatgcagaaagtttaataaatgaacttaaggagggggtatgtgatttacacaggggatgaaagatcggttggaggaggcatgccatttgcaagtgtgcaaagaagctggccactccaccctaatcttttattatgcagatggttattctagctggctggtgccatgttgcctcgtccttattgtacacgtggtgacaaagaaaagggaagatggagcctccgtgttgaacatacctggcttccaggtagccttctcttggcgcagctgccagcattcacctgtacaagcttccagcttgtttatctatgtctgtagctcggtttttcaggctgctctttgttagaaaagaaatgatttgggggctacttttattaaaagggaagccttgccgaagactccttgtactgacactatctgcctaataatttctttctagctcctatatcaataataaaaatggtacctccctcataggaatgttgggaggataataagttaatgtagagaaagtacttagagcgttgcctggctcttaggaagcactgtgtatgttacctagcaatagtaggcatattactaggtgccacaggccttttgaattgctcatcaggagactagaacggcatctccctgttggattccagctgagcatcagttactggtggaagggggaaaggtctatatttaacaacttaacccaataggaacatctgtccaaagaatcaaaggccatcaaaaggaatgcaggagctacacatgctgttattttgtctgacagattttttcacaaggtaatacttgtagcacatagcaagggtctgtgatggagcagctacagccgtgccctctggctcctcatgtggaatgtgagctgagaggcccagtgtcctttatctcctgggatcttaaagcagataggagaggcacaaatggaatgaacattctatatccttccaagcaagagaccaagctcatgagggtaaaagcaacttaataaggacccatgcccatctattacatcagtccataaatcattctgatggcaggatgttatcactgagggctttagtttaacttgaaaaaaataaaaatttgtggttctgagagaggcggtgtttgtgcagaatcacaaaggatctgctaggtatgaagcttaaagcatttccctggaataaggagaggaaataaataagccataaagcatctcttgggctctgagctttcaggatctgatagaaagctagacctcttggttaattccaaaccagactccacctgctttcccagtctgaaggccacacccatcattctccctggtttatgaggtctctttggtggtagtcacgcataatgtgatttaaattgaatgagatcctttatggcctcttcctcagactcctctttgtttctctccaaccttgacaaggtctttttaacttcctctccattcttatcaaaccaggaagcaaggagggtgagtctcatatgtacctagtggagtctacctaggcagtgttcgtttattgaccgtccaacaatcttctggcgataggcagaggggccctgcttggtcaagtttgcccaagtcagacaggcatgggctttggaatcagagaagctggcttgaatttcaggtttgttactatttgactgtggctttgaataatttagtctcctctgaacctttttccccccttctctctgaaaccgcattggccaatatggtaaccactaaccacattgtggctgtttaaatgaaaaattaattaaaataaaaaattcagcacttggttgcattacccacatttcaagtgctccctgtggctcatggtgaacgtattgggcagaacccatctggcacatttccatcatcacggtaaatccgttggacaatgttgatctagtctaaaaccttgcagagttatcatgagatttatgtgagatagtatttgtgaaatacctcacaacaagagccctaaaattgtagctattttctcataagtacgaccatttagtcagcatttactttgtcccaggtacttagacattctcaatattaattctttgaaagccctgtgagtcggtatcagttttcccagtttacagctaggaaaagtgaaatatggcaaggttaagcagaataactgcaagattctccagcagttgcctggtgaggaggctgacatgcaaacccaggaaccaaccactacaaggcctggatctcaaaaccactgtggactgccacctcttctgaaggttttctttcccagaaaacgcagttttgtgatggaatgtgaatgcctactccatttcacatttctctacgtcctaatgtatctgtccagtgacaaacacagaaaagcccctggccaactcatgtttaaataaggtagagttaaagcttttatgatctggtccaaaatagctgtccctagctggtaataagacttgactatgccctatttgaagatgccaactccacagtataagatacagacatttgcagttaacttaggaagtgatggcgagagagagggcaagagagaaagggtaagaaataactacaactcacaattaaaataaaatcagctaccacttagctgtatccccatccaaggaatttctccacttcaatcagagtatttggcctgctgaactctctgacattccttatgaggggattaaactttattgaacagaatcactttaaaaattgaaataaaggaaaaatgtttaatgttagttgatttgaaagtaacttgaatctttgaaaaataggttgtgatattgattaatgttgaaacagcatgtgtgagggaaaatatactaaaaataacacacaagtgaaaaacatactctatctttgataagagagggaagtgtctctgtaagcctgtagtggcacaaacccctcagagtggggatctctgagccagaaatagcttctagcaatggtgatctccagcaaaagtgattctagactctcaaacagaatgccctctggcctctgcttaagtagtttcacaaaaggtgttcctgtccctttctagccttgctctctagtggcctaagagttgggctggatgagctaacgtgtccttgagctctaaggcgtgactgatgaattttaactaatatgagaattaaaattctgcccaccccccaaggaagttctcttatggtttgtttctttaccagaaaattctgttaccatttaactgcaaaacaaatagattcccaaaggagaaacattccagctttcttttatgatctcccctgcagggcccagatctggaggaggatttttctgacaatgggacttcacaatagcctggcctcaatctggtcagggagccatagcccactttcaggtcaggagggattcatgtgaaatttaaaactgctgttagggaaaaaagaatagacatgatgtgtctttactcaccagagggtagggttattatgtttgttagtaggaggtggtgagaaaccaaattagattgtgttttagttcctttcagctgattacctctcatccctcagatttgctctgtgaattttcatgggtggtttgaagcatttggtccaagaacctttcagccacagttgatgagctgattgtgggttttgtcgtgagcctggtctttagtgtcagctgggtttcattctaagatccccctggagaatttctattctgataattgcttctcttaacaactgatacgtttttattttatgagctggatgggcacctggtaaatattttttttcccttttttgcttttgttgctggggagcccagagccaagttgctatcctgctataactgtgtaggaccttatgacaggcatttcagagagctgccttttactctggccttagtttactattccactttatttttcttctctttgcccagatttctcatcctattttgaaaatgatttcttcacagtgtcaaacagtgctcctggttcaataggaattcccaggacgtgcctcaaagtcacccccaacctcgaagatgagtttgtatgcattacaaaaagggactcctgcctttaggcagacggcctcaaccagtgcccttgtaattgcacttctatccttggcagtcttccaaggacttccttgttgggttctgggcctgatgcagccccctcaatttgagcaacttcttgtttatttgttttacatattggcctgctgcaaaatcttttatttaaaaaaattcattttttcatttatttttaagttaatttgttagttttatggtgcttttgatgtgctaggtgctagaacacaaaggtaaacaagactgcttcaaggactctgccctcttggaggttgttgcattctggtgtgggagtcagtcagtaaatcaaggatcagggagagcctctctgaggaggggataatgaagacaaggtctgtagaatgaagaggagcctgatgcaccaagggcagtagaaagagacttctgagcaagaggaactgcaagtgcaaaggccctgatgctagagagagcttgaggggttgcaggaaaagagtttttatggttgtgaacaagaaatagaaggaagaacagagagtggcatgagataaaatttgaaggatcccagatcgttcaggaccttttcggccaggtaaggagttgggattttatcctaaatatgataggaatccattgaatggttttaataaattcattcaaagtttaaagaatcaatctggctcctatgggcagcagaaaaagcagaagtgagaagatcaatccatgggagagataatattggtttgggccaaggtgggtggtgatggagagggagtaaagtgggtgtgtattcgaaatattatagaagaagacttgctactgaaagtgagaggaaaagatgagggaaaattaaggatgactcttagtttcaataagtgaccagatgctagtgacatttatggaactaaggaagtactgtgatggagaaacttggaggggagagaataaagagttcagttatggacatacttatttcaagacatcctagtggagatgtcaaatagcaaatatttgaactcacagaggagaggatggggctgctcttacaaatttgagggtcatcaggaaatagatgatattgtagacacaagattgaatgaaatctaggaacacagtggaaatgagaattcccagaaccaagtcctgaggactatgtaaaagttgagtacagaaggaaaaggcgggaaattagactaaggtaatggagcacaaccaggattggagagtgtttcaagaaggaaggaataatcaaactctcagagatcaactcaggtgaggaaaggaaggtgtgcactcctattttgcagcatgctggactggccagagaagttttagagggtgatagaaatggaagccagatagagttgctcagatggtatgaagagaggtaatggaaacagtgaatatttctaagatattatgtcctgaagaggatcagggacatggggtagtaagtggggtagtaagtaaccattgagaaggaaatataagattaaacgtcactgttgactatccatttgaggtttataatcttgaatttaaactaaagccagacagttccattttgtgattttcaccaccaagtttggtgataaagtatgcataaaatagacttcgttttttggccaagaaaacactaaatgagacatggaagttgcgaaccacctgtgagggagtgattgcaatattgggctgctttggaaataagctagataaggatggaagtaaaaggaggagggaactggtgcgtagtgagagattggcagggataatcaaaagggatatttgactttgcaaagaagtcaaatataggaggggagaactgtagagctaggggctagaaggaccagatggaattccaagagtgagatattaggaattgaaatgtccaggtggtaatggcaagctctaggggtactcaggggggaaggaagaaaagaattttgtatttaaggaggccaaggaagtgaaagttcactctcaaaataagttggaaacccattcttatttattatttgtatttcatgaatcatctcaaatccttacttggaattaggtgatagggtgcacataagaatgatagtggctgattctttgtggatctactctgtaaacaccattttacgatgtacttttgtacactgtgtaccaaaattcttcattgccgtcaggatattcattgggatatatttggaaatgggctaattcttatgtcttgattagttgataattctcatttttttagtcagtaacaacataagacccgccatggccttttgggtaatagctaatgcttttcaggtggcacggaagacccttgcaatgaaacaactcttctatacatgtcccatcacaccccctgtcattctcttgaagtgctctagccacacaaacaaatttctaatgtgaggtcaatagctgctcactctgcctggcatgaagattcatctaaagtatcaacttctgggttaagccttttctaaaaggttgaactgtccaaaaatgccattttgaagggtcaaaaaatgtcatatactggcactttcatattgttaataatttgctaccactattacaagtctgaaccatgcattgttggtagagctattacttgctgaattggaattctgtgttatgtgctttatgttcaccatctcatttaattccagcaataaacccaaaaggtaggtggaactacttccacttgttagacaaggattctgaaatttagaaagggtctttctgggagagagtacataacaaatggtggaactgggttttaactcctaaagcaaaaattataccatgccctttcctttggtcttattcatggcaatgacagcagtacagagcacacgcctgatacagagttggaatacataaatacatacagtaatacttcatctgccagaaaactacccaaattgaaggctgctttgttcagggacccctaggactactttatgatggcctagtatcttggcattggatttaccttgataaatgttgttgttcccctgtaatttagaaagataaattttaacaggtgaaactaagagtctgaacggcccttaaaaccttaatcctgtaattactatttatttgttttaaggcactgccttgatccatgtttgccagacaggttcctaattgctggcattgaaatgatctaggaagccagtttcttcagctcatgaaaagaacatgtagatttgttgaagtgtgaatgctaagtattggtgtaatgcagtcagagggcacaggacatctatgttcatttcccaaatgccctttttctttcattcacatggatttttcctctcattcctaagcacagtggtgctctaataagacaagaagtcagttggcaagtgtaacacagatgctctgatgccttgaatttggctaatattgcttcttcattcaaacgtcattctgtagctttccctgagtttctggtgtcaaaattcaaagcaatggttgtcaaactttcgtgtgtgttcgaatcttctagagggcttgttggaacacagattgctgggtcacatccccccagactctgactcagtccatctggactggggcctcatattctgcaattcagtaaagctcccagctgatgttgatgctgctggtctagtgactacactttagctctaggggctgttcaagatgcgctttacaggacaccaaatgaggttagataaaaaagcaaaaatctcagcaaatatctgaatgctagattttacagacaaaaaaaaaaaagaaaaaaaacacaaaacaaaaaccagtgacttaaaaaataatgtatctcctgatttttgacatcagtgggctagaacttgggaatccttcttccaagatattaaggaaactttcttctctatgactttcatgctttcagtcagtatgctttgttcttaaacctatcctagagcaagatgttttattaaattgatcagttttacaatacaaaattgaaagcaaagagttttcaaaatgaaaacattccataatacaataagaattgtggatattacatacaaaagagtgatttctaatttgtttagaagctcagcaatattttcatttttattagattcaaaatggtgtgagtcatgaagatcaacacatttctttttgacaggaatcctttgtgtttgaacccaactgcctcttcaaagtggatgagtttggcttctttctgacatggagaagtgaaggcaaggtatggcccaagaagagcaagttgttctttctgctttgtggtttaagccattttgtttctcaacaagtagactgagtgctgttgatgaaccctacccttattcattcattcaagatttttaaaaatgtgcctacatgtgccaggcattgaagtatacagtgatgattaaggacattatcctcatagattccagtctaggagcaatgtcaggcattaaaaaataagttacaagtcattgaatgttgtgaaagagaacactggattgtcaaagagcttaatttaatcttgggagttagaaagaaatctgccagaagaagagatgctcaagctgaaatctaaaaggtacattaaaagtgtgttcatctcattataccctgggacttaattcgatgtatggtacagtgtccacatttaatgaacaattgagctgaatttaagaaaagaattaaagttatataaaaattagcatttttctcacatttcatgtacacacatgtatttaatgattattaacaatgttttatatataaaagtaacagattttagaaacatttttatattcagcattgcacatatatatgtctatatgtatgtatatatatatatgtgaaatggaatacttggggtcttgattatttctgattatttacaataattattgttacatggttttaattccctcttcaagctgactgtaatcagcactgccttcatcatcagaaatttttgccaagcagtttgcctgtatcataggtatggcataatttaagctcattgctgtgttgtattctctctcttcaggaaggacaggtgctagaatgctccctcatcaacagtattcggtcgggagccataccaaaggtacctgtgattggtatttgcttttctaaacacggatttacttatattggaaatggccatggcttctagagataaaaaactcactctttgtatccaggctacttaaaacatttgatctcagttttgagaatagcatgtggttgctggttgtggtaatgtcacatttattcacatgaaacctctgtgactctcctctggtgagagagaggctttgtggacaagcagaccctaataaaaggctcttctatccaattgccatattccaggtcctccaataactacaatcaaaactctaaacaaagaccctcatatctagtttctaaatcaaaaatttaggccagacacagtggctcacacctcccagcactgtgggaggcagagggaggcagatcccttgagcccaggagtttgagaccagcctgggcaacatagtgcaaccctgtctctacaaaaattacaaaaattagggtgtgttagcatgtgcctgtagtctcaactactcaggaggctgcggtgggaggatccattgagcctgggaggcagatgttgcagtgagctgagaatgcaccactgttcaccagcctgggtgacagagcagagactctgtacctcccccaaccaaaaaatttgtaatacctttcttatcagttgatttcaaggaatatatagtgttacaaatttcacctctacaggttttagaataatgctaggtgtctgggcccttatgtttatttttacattaaatgtggtttctttttaccacgtttcttcctccatgctctgtgatgtaacttatttttttttctatctgtgtacctctatacaggatcccaaaatcttggctgctcttgaagctgttggaaaatcagaaaatgatctggaagggcggatagtttgtgtctgcagtggcacagatctagtgaacattagttttacctacatggtggctgaaaatccagaagtaactaaggtagcttcagttaaatggcctccttctcttccccaccatgtatatatgttgtgtgtttaattttatgcgtgctatatttttatatacttaaattgtatggtaatttaaaagttagcattgctttgctgacatgtttctgtagaaaatcagcaattaaaatacccttttagcatgtcactcctgtgggccaacaacccaaatacctactacgatatgttgtagggatactagtccagcacttctccaacttgagtgtataccagaatcccctgagctcttgttaaaatgcagattctgattcaataggtctgaggtggggacaagattctccttttctaacaagctcccaggtggcatggatactactcatctgacaactacagtttgagtgacaaaggtctagatcagtaccacccagtagaaatgcaatgtgagccacatatataatttaaattgttcttgtagctgggttttaaaagtaaaaagatacaggtaaaattaattttaataaaatattttatttaacccagtagacctaaaatattgtcattttaataggagatcaatataaaatttattagtgacatattttacattcttttgctcatactaagtcttagaaatctgatgtgtattttcaaatcagactaaccacattttaggtgttcagtagctgcatatggctaatggccaccatactgggtgggcagtacgggtctggatggttaagaaatccaaaccccccctcccaataagttattaaaatattgggttaagatcagtcttttaataccatatccagcataccattgccctggcaagtgagtctcaaagagacttctcgaagaagtagaaagcctcgtaaatattttgtctgctaatcatgtgtttacagggtgattttacctctgtacagagctcccattatctttctgtaatgtgtgtgaaaaggactaagccttcactttccatggcagaaacatgggtttgggggaatggggaggcattttgtcttctcattaaccctataattggaaactcagtgtaggttgaatgagagagggttccaacaagtggaaactcagtgtaggttgaatttctaatatcattagaaatattgaattttagagctaacaggaaatgtacagggaagatcatttgaggacactgagattacaaaacttaaccatgaatccaggataacttatggcagaattgagttctgttgacccctaaaccatccaagctccattaccctcactcacaaagtatggtcctcattccagaagtacagacccctcctgggagcttgttacacatttgagtctcaggcccacccagatgttctgatcctgaatcttcatttttgacaagatgctccaggtgactcggatgtgtggtgaagtttgagaactcctgttttgtagctctggaggcagaagtggatgctcgatgtcacataagagtgtttggttctgtccttattgtggtggttttatgctatcgttcaggtcacctcactttgggagaacagattttgcagtgccttcaagttcttttattactcttctgagatcaactccttctctaattaccaattcatattacaagaaacaggatgatgcagtatgagctcaagtattggggctttggggccacattgcctgggttcaaatccttgctcgtccccttcccagctatgtgaagcagatatacgctggacctctctgtgcctcattttcttcatctgtaaaatgggaacagtactagaatatctgctcttaggatgattgtgaggcttacatgagttatgacgtgggaagcactttgtgtactgcctttcttattgaaagcccttaatatgtgttagctattaggatgacagaggccaagaattttagagttcgaaatggaccttaggaagggcttctcacctcatttttcagatgagaaaaatgaagctagagaggtaaaggaactctgagaccacacagcaagctgggccagagtccaacctaaaaccaggtcttctcatgccctatatgctgcacccactttgctctgtgccctgagcaaatacagtcctggggagatggctcaaatcagtaaatcccataatgtttttgctttccataatttggttgctgttagtcttggcccattctaagaaccacgttctgaaacatacccttgagtagattatggatgtgtactgttggcccttgaacaatgtgggggttagagctaccatacccctgtgcagtcgaaaatccatgtataacttttgactcccccaaaacttaatagcctactgttaactgaaagacttatgataatattaacagtcaattcacatactttttgtatggtatatgtattacctattgtattcttacaataaagtaagctagagaaaaagcaaatgttaataagaaaatcataaggaagaaaaaatatattattcatgaattgaaagtggatcatcataaaagtctttatcctcatcatcctcacgttgagtaagcagaggaggaagaagaggaagaggttggtcttggtgtctcaggggtggcagaggtggaggaggtggaagtggagtcaggagaggcaggcacattggtgtaacttttactgaaaaaaaatccatgtataagtgggcccacatagttcaaacccatgttgttccatgaccagtgatatatgtttgagggttgggggtggggggatgtatacttcaagggaagatttgaaggttttctcctagtattattgccattgaaatttaagagcagctagccagttaagaactaaaaaataattctgtattggattttttattcaaactcaatactatttgagcctgctcttactgaagaaactaagtgtttcagcttctgggaactattacatcgaatttcattaatagcataatatataaataaatataaatctcattgtccaaactggacagtgcattgtcctttcggttgattgacactggagaaaatattgagtacatttttccaccaaatatacctgcatgtggatactcttgcccccttccttatctcaaaacttaaaataaccatatttaccaccttcagcattgacaacattttctccatcaccaccgttttatttctattcctctatatgtgtttctattcctaatagaacacacaagccatcaaagtgaaagtctttatatgaaatacacatagatataattacctcagttcgaaatgatggcaggatacataaatcaaattgggccaatgagaaatgtagagatttcccagggtacatgaaatagtgtttgtgactcactgagtggttctactcaaacgtgagtatagcctaggagcctagaatcagggggccatgaaatatactaacagccctcttacttagcccatgcaatgagaaggtgcatttttggtcagtttatcacaaaagtcaattcgagcaagtaatcattttttaaaattaattcatatataccttaaacactgtaacttaaggcatataaatgttgttctattgttgactaatcttttaatgttagggacaagccttttcattaattgtggatctgttgcgtggcttttatgttttggggttttttttttttttccccctgtactttactctgaatgcctcagatagccagtttggtttctttaaggtggatctgagactaaggacactcattgggcagagtgcaatggaatgcaaaatcctacagttctgtgacttttttccctaatcttttagttatcttgtctacatggaatttgagaaaaatatttttggcaacttgcctttaaagaaatcttcccaaaatattcagctagagaaacaacaatgccctttctttccacaagatcgtgtcattggtttacgcaatttttatgacaactgacaataaataggtttgaaaacaaaagtaacccatggtagacatgtaaggtgagagtaaaagagtacaaaatattggaaagtggcttgctggctgggagagtccagcactccctgggcaatctgtgtattttgtttgtcttataaacacctgatgagtcttggtctgacaagtgaaatgtaagttaagtgagtttctagtacagaacttgcttatgagtatcctatgagattcatgagtctttttttttttaattcctaggctcttattacacttaagatctgaccatttggaataattcacttaacccaacatttaatctaggcaaaagggtaaactttgaacttagtgtcttttataccaaggaccatgttccatgtggaggaagctttcctgactttcagcaagccattttcccttctgtattcttctacttctcaaagagggtctctgatagtttttttttcatattcaagtgggtgctttaagagtcaataaaatattatctgaaacctgagtttctcagggttgaattttaaataaatacaaaatactttccagtgcatatgactctgaaaatatgattgtgcttttttcagtaaaagataacagcattgttaagagacaccttggtagctcaccttgtcttttcttcagcttctctctctgctttgagagtaaatacgtttgtgttgccactcttacctatttaggagatttgtgctcagttctatatacctttctcctctaccggtaagtcccaaatcaaagctttcaactcttctcacctgcttctcccacagtcattttcatctcaacaaatgtgctctcagttgcagagaccattctcagttgcagagaccatgaacaccttcctcttgtgtcctatgttagtctgttcacaaatactgtttgctctaccctcagcaggtatccagaatccagctgctcctcaccaacgtcatcacgacacagtggcccaggccaatggtccaggccaatatcatttcttccctattgtgccccaagaggtatctaactggtctcttttccttagccttgcccattttggtctagtctaaaaacagcagctggagggatgtttttaaaatgtaattcagatcacatcactccactgctcagaaccctccaaggccctgctagatatcatccccacctcccttcccctttctaccttaatctctctctttcctcctacgcattttcttccagcctctgggacttggcatttgctgttccttctgtctgtatcgtgctctttcccagttacacacagagctttctcccccacagccctcacgtgtctgctggaaaattgtcttagcaggagctccccatttcaccagccttcggcacttcctcactccttttcctgctctgtgtttcttcttagcacgacttacttaccataatatccatttattcatttattttcttcctctgtctgcaggacggcactgttctgttcactgctgtatctgcaacatctagaactgtcagtgcccgacacttagtgagtgctcaataaaaacctattctattgaggtatttatgttgactaaatgaattccaacccaagtgataaaggtgtataaaccttaatgttgtgcaactcaagtttgtacagttcagttgttagaacagacaggaagatgatcctttgacaacaagactgagaaaatgtgattcaatgatagtctaaaggaaagacagaactctgggatcccgtgtgttatttttagagccacatttcaggatgtaatagcgctgctgctaagaatccatgacgagactggaggttttgaccctggtgtcctggcctctttccagtttggatcattatgtcctgcttacctaaatccttcctgtcgttacagttagagaatttagctttcatttcctctcctaaacaactgcctgttaaaaagaattactaacaaattgctgtcatatttaccccaaacctagtacacctttcgctaataggcgagtcttatacatcataaagcttaaaacagttaagaataaatgcagcctactaaaaaaaaacaaaaacaaaaaatttacccagtgtgatggcagatgcctgtaatcccagctacaccagaggctgagtcaggagaactgcttgaacccaggaggtggaggttgcagtgagccgagattgcaccactgcactccagcctgggcgacaagagtgaaactccatctcaaaaaaagaataaatacagccaaatgaaggtattttcccatttttttctaaactgaaataaagctcttttttttttcctggaatcattctcatctttttgctcactgttttacaaggcactatagaaataattgaatatgagcattctaataagttaatttcattagaaaagcaactttagttcctctcatgttttcttttgttttttcctcgctcagaatacaactagcttggaaggattttggtgtctagcaaagttgaaggcagttcagatgtctttcattaataagttacagctggcactgcacagcaaactgaaatcacagtcactagacgtaagatggaaatgcaggcctcattcaacatctccataaataaatctgttattctataccaagttgaattttcctttgattacaaaaaataagctgttattatgacgttcaaaatgcaaatattgggattgagtttagaccagactgctcattatactttatgcaggtttgtaaatatttggcaaacttcataaattatgccttgtaatcaagtcatcaaataagcatgtaaataactactatagaaattaaattacaaaaatattatgtattcttttgtgtacaaaaagataaagtcaggttatttgttaccagtaataaaatattattttaacaaattgggctgaaagtcaaaattgctttgctaaacttgaattgtgttgagtgaaagacttactgcaatggttccagaagaaggaatttattctttgtttcactaaaaaaaaaattgattctctatttaaattgagtcctcctggctttgctaacatcctgcaaagcctccaagccctgcaaccagttcctctactgatatttaaccacagcattaccccaagggatcagaggcttcagcctcgtctggggacttcttagaaaggctattgcatttcttaaaattcagttttaattatactgtataggccagtggctctcaatacctgagaacttattagagatgcagattcccaggccctgccccaccctactgaatcagaaagctaggatttcagcggccttccaagtgattcttatgcacactcaagttagagaatcactgctaagcagaaaagctcaatcactaacatttatatcctgctttacttgcagaggccttaaagaacttacattaacttagtggtctgatgcccaggctcaactgagctgatgcctgctgaatactaaagcagctaaattgtaaatctgaactgcctattgatcacccaaaccccagtatactaattaataaaagcttcttcaccacattgcttcaacagtttttgaggctcaaatgtgggatgagtgtgtaggtctctgtgttaatttttgttttgttttgggtttctttaacgtttccaagactgaaagttgacattttcttgttaattgtttttcttgaagctcttctgagttcattggaaacaaatcaatgagggggggcattaagctgtccggagtgcagagctgtgaatcagaacaaataattgagtgcatattcttaagtttaaatgtcccatcccacctaagagttttctttttgccaaataaggataatgggttttattgttatttctattgctgggttgagtttacggaccaccagtctctgccttacatgggctgtggtcatcagagaatctgtggagctggtgaaatcagtctcctggggcctcccatgaccacctttttcctctgtggctccttcttccttgcctgccagttctcatttgctcttgcaagaccatctctcctagcagctgctacctcagtgtctcatccgtgatggcgctctctgaactctgaattatttatttgtgcatcaccaaaagtgatagttcctttagaccagattttgtgaactcagatgcctgtgggagccagggaaatgatgtgaatagctgaaaacatgtcaggcaaagacaaatacgggagggtgtggactttagcaagttggagtgcacatacgctgttgaggggggcactttcacttatttccagctagttttccaactaccaaaacatgggcctgaggtttctagattgttttcatgtccatttaatactaacgtggattttttacatgaaatctcttgatattaaaatgttggcaactcattttttaaacattgtgcaaaatgacaaacatgtctgtggatcatttagaaccatagctatagacatcaggcaccatgtagcattaacacacttgcactaaagtgaatgctaatattgacttattgtgttcaccttattggcattttaaatgaaagatacctgtttgttcctttatttcttcattcagctattcatccaggaatatttttttgatgaaacctgaacttggacaaatcatttcaattatattaatctttttaatcctcatttgttaaagaaaggaattgcaccatgtgtcctttgaagtcactttctcttataagacttaaggaaggactggctgggcatggtggctcacacctgtaatcccagcagtttgggaggctgaggcaggtggatcatgaggtcaagagatcgagaccatcctggctaacatggtgaaaccctgtctctactaaatacaaaaattagccaggcgtggtggcccatgcctgtagttccagctactcaggagactgaggcaggagaatcgcttgaacccaagaggtggaggttgtagtgagccaagatcacgccactgcactccagcgtggcaacagagtgagactccatctcaaaaacaaaacaaacaaacaaaaaaacttaaggaagcactctctttgcaaaataaagtgtaccaggagccaaggatggtccaggttagttgctttgacaggacacttgtgtacacatggaaatccctagataagcttaacctggactacatcatcatgacaccaggagtcagctactaggataggaggctttgtggttggagaggtgacagaagtcattctgggtacttcctgtggacattaaaggttgagagatcctgagatagaatgcaagaaaatcagttgttctcggcttcaatcagttacacaagaaggaaagatctgagaaacattcagtgtggaatccagaggttttgttcctgggtaaagttagagaagctaaaatagagaccagattctgattctgattaactgggagtacgatgatacagctaatcagaaattgagggtctggttactttggatcagggagaaaaaggaacaatgaatttgtttaaatttttttctctgaggaacctgttagttgcatgacctgctatgggtgatgcaataggacagagatcatatactacttaggatccttaggggcttgtccatggggcgagctctgttctgtctctgtggcacatctctaggcctctgaaatcctgaaaaggtctacgtttgtttgtttgtttgtttgtttttgaaactccctactttcataaggaattaagtgtggatttttagctggcatttttcttagtgctggacttacttaaaagctcctggtcaaaatgattcttcaggaacatgcagctgaagctagaggatatttgctgttgttttcggggaattttgtcacctgtatcagtgaagttatttctttggatgagagtatcaaagatgaaagaggcctcaagcctccgcttagctcccaggttctctgcagctgcactgaccatgttgacaaggtcatttaaacatttgcatggacagtgtgtttttatactgttgactggtatttcctgaatgctaaaggaatgttgctcatgatagaggatgtagttgcatgacattctatgcagaaagtacaggatagtaaaaaaaaaaaaagaaaagaaaagaaaaagaaactaaaaatcccctagagtgtatttccccttctgtgtcttttcttaattcaagtgaaatttatgtaacataaaattaaccattttaaagtgaacaattcagtgccatttagtacattcaccatgttgagcaagcaccacttctacctactttcaaaacattttcatcaccctcaaaggaaactgcatgcccaataagcgggttcctccccatcccctctccccacagcgctgataaccactctaatgagtctttttattccccacacactttcctttttatatgcagttggactcatgctgtttaatatactgcattttattatatgaattttcctgtttaaattaaaactttttcttaggtttcaatgtaaccgcaaatccccatgatctgtgaggtggattttcatgggcgctcagctcttgctgttttagaaatcatccagcctccttcacagttgtgtttgaaatgctgtgctcttcatggggcacatggttttcagtgctggagcctttctcaccactgcatttcatgaacttgacaggtttcataagaagagactgtagacccagcccagagaagctcattttgtcctagttgcaagtgttatcaaatgactccaccaagggaatgcaaaatgaattactctaattgcactagaagcataatgtgaagtttgtatttcaccttttggcccctgggagagaaaaatgtcactgactttaaattgcttttccattttccacatagccccagtttccagtgccagcaaaaaattgccattggaaacataatgtatgctgacatgggcctacatgtatttgtatgttttctcatctgtgtggcaaaattaaaaactggatggcatgaagaagtgggcagaatcccttgtattacatgagactttgttgcctccaagctctatgatctggagccagtaatttaatgatcataatctggggtcggcaggtgcaggccatgggctgaacacaacccttagcctaattttgtatgtcctgtgaactaagaatggcttttacatttttgaagcgatgtttaaaaaataaatttaaaaaaaaaacaggaaaactagacaacatggaactatgtgtgcccctgaagcctaaaatatttattatctggctcttaatggaaaagatttgctggtctctaataataatactaataatagtagcagcagcagcaggaaaatagtttatattgtatgtcagacactgttcaaagtgcttgatatgtattatctcatttaactctcacaagtctgtgggataggtattatgattatcctcattttacaaataaagatgcccagagaggttgagtaacttgacttttcaaggccatacgtccagtaagtggtgttttgagcccaggcagtggctctctctagtgctctagatcctgaattctaccaccaccctgtgctgcaattcacagttggcttctttttctttttctctttttttttctgaggcagagtctcactctgtcccccaaggctgtaatacagtggtgtgttctcagctcaccacaacctctgcctcccgggttcaagttattcttgtgccttggcctcccaagtacctgggattacaggtgcatgccaccacgcccagctaattattgtatttttagtagagaccgggtttcaccatgttgaccaggctggtctcaaactcctggcctcaagtgatccacccacctcggcctcccaaagtgttgggttacaggcgtgagccaccgtgcacagccagttggctgatttagcttatctgtataaaaactggggcagggagtggggggaacagcctctttcacctgtaacactgtgtgatgttaatgtactttttaggcaaatgttttaagatcattatctgtgggagctatagtcatacagtagtacttcccgaattagtggcctgaaaaaaggattccttaaaaaagtccacatataaagggggttctttggtcagctaagcatgagaaagcctttagacaggtttctttatggtagtgctttcagaagaagtatttcttttttttttttttggaggagctgggtctcagatatatttgagtcttagtgctttactctttttttttaagttttagggtacatatgcacaacgtgcaggttagttacatatgtatacatgtgccatgttggtgtgctgcacccatcaacagaagaagtattattcttatgtggatctcagcaaggaagaaagctattcagctgtttcctaaactttttttttaattttttgatgagacaccattaacatctttcagaaccagtgtggcactgaataaaagtcagtaaattatatcatagaggcattattcagctcaatatttttctagaagtatcaaaacaatgatgtaatctaaggattcatttattcatatttaccataaatattctatttattttccctgtttttccacttccacttgtcttcactcctcactgttttctgctgtgtgtggggagactttaccttaaaagacagagaaccaggtaatgaaactcaagcccaccgatttagattccttttagtagctcttatattgaaagtcctatttagtttatagaattacctatagatttgatttgcttgaactaaattggtggatgctgcctagttaagagttagacaaaggcttcttgattgattatattgatctcagactaagcaggtatgattgtcatcaagttgaaatactatttactttggcatgacttaatttgccaacattgtcaacaggtacctgtcaggaagaatgtgaccgataaatacaggccatcaactaaagaaacaactctatgaacaccttttaattcaccagctgtttactcatcccataccaacagaatttcacaaatttgactgagttgagtccaaaagtaatgctgtcaaaaaactgatggttgctgactggcttaagatgatgcttttggttttctcaacattttaaaatccctccattcttctagagctttccatttggatgccaaataatgttacataaaataaaccaaaaatcttattttatttttgaaagatttctggggatgtaggaatgtagttggtctgtggactttcaggcactaaagaacatcatgtgttgtatatctaaatcagaagcacaagtgaatataggcattaatgtaagtatactctatgtatacatttttccctcctgatcttttgtgtccataacagtatatttattgtagtagatatttggaaatagatgcagttatttgtgacaagattctatagatccaataggacattgctacagggtatctattaatatatagaatcaggcttaggcaatgcaaaaattgtgtctaaggaatgctaacaaagccatttggtatggaagtttgggactgcagcttctgaacagcacaggtgtcctcttttttcttgtgactatttagaggctctttttgacctaactggccagtgttgtcaagataaccagcaaggctgatagactgttttgactctctgggagtgactaaattaattttgtctaggaatgtataaatattatcctcacccattcaattatctctttcaaacatagccacccatactcatagatggcagcttatttcttgcacaaatactcattcaccatgctctgagggtaatttaagaatcatatgatttaattttgtctaggaatgtataaatattatcctcacccattcagttctatctttcaaatacagcctcccatgctaatagatggcagcttcttttttgctcacatactcattcagcatgctctgagggtgatttaaaaatcatatgacacttaatatatttcttctttcactttcatcaattttactctgtagcttcagactgtcaagaaaaagaggccccagttgctctctttttccccctttcaattcttctcttttagaatttgaaaactttatgaggattattattgacttcccaagggcttttgaaattaatgttgggttgtctttttaatttttgtgggggcaaaagtcctgttgctttttagccaccagtttcagaagtaggttgctgtcagtcattatcacaggctcactgatgtagctttctatcctgggtttatcaactggacttgtgtaggatggcagcttagctcctttattatgcaggaaagtcttcactgtcttttttcttgcactcatctttcttgcagcaacagttcatggtgaattgccctcttgtcccatgggcatgtgggcgtttccaacactgacattgatatcttgtgacactaacacttagtacctgcacttgtctgtccttggtggagccaggagaaatcagctgacatgaaagagagaacttgtttaatttttacttcttaacatgatttagaagttggtctgttatacaaacaaacattagtggttttgttcctttttaattttaggctggatttagtgtcctagatgaatacctttgaaagataaaatgttcatttgtcaagtcctgcctgtaccatcagcttctccactctccacctctgccactggggttttataattcccaggcctcagacctggaccaaatgctgtgggaatggggactcaggctttgggaacgctggcccttagcctctggctcctcctgctgctctgctggctctggccttggtccttaggtctggactggacagttggtggcccaagtcatgttctgatataccccaattttaagaagtagacctctgtctggtttctgtactggcccaagtcatgttctgatcatgtaccccaattctaaaaagtagacctgtgtctggtttctgtactgaatcatctggtaagagttatcccaagaagcccagatcttccagaccagaactatctcaagcaggaggagctgtaacttccaacagtcttcctctgggccagctccctgctgcctgatgagatcctggaaatcaccagctcctgaatttcctgtggctgtgaaatatcctcttacccaacctccctgcagctgcctgcattgcttttatgttgcctgtaactttctttcaaatacttcaacacatgcagtggggtgtgtgtgaattttcatccaaaaccagggaatgagaatttaaaattttaaatgctcaccctaaaggtagttagttagcgtttgaaaaatttgaatcaaagcttaaagatcaatcattatatataaattatagctcaataaaattaattcaaaataaaataaaacaagcctaccctccagtggccacctacacacccccttcagttaattttctctctcattagcaccaggtgctctgatactagcctcctggagtggtttctacatgatagacacctggaggcttgttaaaatgcagattactgggccctgcccccaagttgctgattctgtagatttgggatagggcctgagaatgggcacttccggtaaattcctatgagatgctcaacccgctgatcaagggaaccacacttgagaacctctggcataatgcagactggaactaccttttctttggtggagttcttcatggtattcaagatatgcaatttgtgtagaaataaggtacaagccctggtatccttgtgagcctagggcacaggaatctggcaagcccaaatgcctgcctggtatctgttggaagcttgttagaaatgcagaatctcagtgcagatgccaggcttactaaatccaactctgtggttcacaaatgcccccaggtgatccaaatgcacattaaagtttgagaaacacctgcccaaaccaaatttagttcacatcatctagttcaattgtcctcaactataggttcacgttagagttacctgcagtgtttaaaaaagcagattgaaagacagcccaagtacattctaattattagttagaatctctagggtgagacccaggcttctgaaatgtcttataattcccccaggtgattctaatgtaccacaggtgctgggaactaccagtctagtctctctaagtgctatccgcatagttcttttaacagtgtactagctggaaatgtcttccctttagcctgccctcaaagttaaatactgacaatttaatgccaactaaaccttctcctaattcaaatgaaatgatttcatttgccatgctttttaaaatttttttattttttatattttgtattattattattattatacttcacgttttagggtacatgtgcacaatgtgcaggttagttacatatgtatacatgtaccatgctggtgtgctgcacccattaactcgtcatttagcattaggtatatctcctaatgctgtccctcccccatcccctgaccccacaacagtccccagagtgtgatgtcccccttcctgtgtccatgtgttctcattgttcaattcccatctatgagtgagaacattcggtgtttggttttttttgtccttgtgatagtttactgagaatgatgatttccaatttcatccatgtccctacaaaggacatgaactcatcattttttatggctgcatagtattccatggtgtatatgtgccacattttcttaatccagtctatcattgttggacatttgggttggttccaagtctttgctattgtgaatagtgccgcaataaacatatgtgtgcatgtgtctttatagcagcatgatttatagtcctttgggtatatacccagtaatgggatggctgggtcaaatggtatttctagttctagatccctgaggaatcaccacactgacttccacaatggttgaactagtccacagtcccaccaacagtgcaaaagtgttcccacccctccacatcctctccagcacctgttgtttcctgactgtttaatgattgccattctaactggtgtgagatggtatctcattgtggttttgatttgcatttctctgatggccagtgatgatgaacattttttcatgtgtcttttggctgcataaatgtcttcttttgagaagtgtttgttcatatcctttgcccactttttgatggggttgtttttttcttgtaaatttgtttgagttcattgtagattctggatattagccctttgtcagatgagtaggttgcgaaaattttctcccattttgtaggttgcctgttcactctgatggtagtttcttttgctgtgcagaagctctttagtttaattagatcccatttgtcaattttgccatgtttttatagactcataagaggaaacatgttggtggtgatttatctacagtccctatttattttagaatctgaggcactggctatatttcatggcaagctaaaactcaaatgccttcatgaaactaaatttctagcttaagatgaaggtgtagttcctgcactgaatagccttcatctgtagatttgtgaaatgttgcagttttacatctaagcaccttataaggaattctatcttagacaagattagatcctgtggcaatctttatttgaaaagcttcatagtttgctccaagtgcatggaaatgtgtcttatttctcttgaatgccctttaggtcttaacagaattcacagtgccaaggagtcaaaaactatatttcaaattatatacattcctgacatattatttgagcagattaaaactgatggatagagcaatttaggcaccttgaaagtagctacttgaaaaatgccaactttttcttatctccattcacttaaacaaaaatgggccaggtgcagtggctcatgcctgtaatcccagcactttaggaggccgaagcagatacatagcttgagcccaggagtttgagaccaacctgggcaacatggccagaccccatctctgcaaaaaataccaaaattggctgggtgtggtggctcacacttgtggtctcagcttctgggaggctgaggtgggaaaatcatctggacccagggaggtcaaggcagcagtgagccttgattgtggccactgcactccagcctgggcaacagaacaaaaccctgtctcaaaacaaatagaaaagtaaaacaagaaaacaacaaaattaattgatctagatttgtgagttgtcgataccaagaagttcccatgttttaaatatttcagatggccccgtcattgattattctcacagctcagatatagggaagatgaaagctgctgcctatagcatcttgcatcctcttgcttccacatacaagaaatgtgaacttcaatcccctaaaaaggtcagagtttccattctagtgaacacatttgttcagcccaggtggggtgggacatgacaaaaaccaagagtgggtctagaaccatggggctcttcccagggctatcactatgagatagaatatcctgtgtgtagtcactctcagaaacagcagctcccttaggaaactgctgtgtcctgaatgcttgtgtcccaccaaaattaataaactgaaatcctaccctctaaggtgatggcattagaggatggggcctttgggaggtgattaggtcatgagtgtggagccctcaggaagaggattagtgtccttattttaaaaaggtaccagatagcccccttgccctttccactgcatgaggacatagctagaaggcactacctatgaactagaaagctgccactgaatctgttggcgccttgatcttggattctccagcccccagaactgtgagaaataaatttctgttgcttataagctacccatatattgtattttgttgtgtgtcaaacaaagacaaaaaccaaactcacatcttatatgggcagtggaaggagaactccaagttgaggggggctgctcttttagacctatgattctcaaattctaatgtgcacaccagtcatctggggatcatgctaaaatgcagattctgattccatggttctgggatgagacctgggactctgcattcctaacaagctcccagatgatgttgatgctgttggtcttggggccctttgagtagtaagggtttgcaacagtgcttcttaaatgtgtgtgtgcaaaagaatcacagggaaggctgattaaaacgtggattcctatttcccatcctgaagattgattcagccggaggcctgataatttgcattttaacaagttcccaggtgatcctgatgctgctggtccccagactacattttaataacaagcctctagttaacttttgaacaacttaattaagataccttcactagtagcctcttctgtgaaaacagagagccaaacatcaaaagatgaaggaggatgctactgagtccctttggagaaaattacatcacaaacttggagagtgccacagggtctctgttcatttttccattgacaatatgcttctttgactaaagacgaaaaataattcttcaggatcaaaacctagagataagattggaaccctaagattggaagtagtgctgcctgatgaataataggactagttattttaggatgacgggccagcctgtgcctagtgaaagcttagaaatgccaatagcagactgagcacggtggctcacgcctgtagttccagcactttgggaggccaaggcggacagatcatctgaggtcaggagttcaacacaccctggccgacatggtcaaaccccctctctactaagagtacaaaaaaaaaattagccgagagtggtggtgggcacccacaatcccatctactcatgaggctgaggaaggagaatcgcttgaacctgggaggtagaggttgcagtgaaccgagatcccaccactgcactccaacctgggcgacagagcaagactccatctcaaaaaaacaacaaaaaaaggaaataccgaaagcaaaatgttattggtggccaattcttaatatacgtcatgagatttggggtgatgtttacttcttactgtgtatttctttgctttacactttcctatgaagcatatttaaatattgttttcataaactgggggaaaaaccctaaccaatatttttaaaagaaaaaagtaaaatatatgctcagtgtaagttcatagtatttttggtttgtgtttgttgtatctgtgtctctctacgtttgtattttcatgggaaagggattatttttgtctatgtcagtcctaatgttcccggggcaaaggtgatagatgggtaagagcaaggtctaaacatatgcctggaagttggacagggcctggggtggtgaaaataaatttaaggagtcccagaggagaggtcaaaagctccaggagagaattagaggcagcttctctttctctccttgccctccaaacaattcagcacaagccctcaagtcccttgaagagtctttctttcccccttcttcttagaagggctgaaacacactttaagttaacttaggaatggttagaaaaggttaaaaaaatgggagaacagtagcaattaacaagctgctagggaaacagggaaaccgtgctgatccgaacatcagagccgacctcctgtggtctggttccctagcacccaggctcaggcttcggcttggggtggccggaccagaaggaaagtgccccgtgtggcagaagtcatctcaggagcgtgtcgccatccagccaatgacttgtgttccaaggactggaaaatgcgcttcctggacactatgtagatgattaccacacgagcttattttcagcaattcaagaaagaatccaattcgtggtttattgcttctgttagtctggaaatggtcaaacaagttgataggcatctagttcacgcctggcgtaactttccaacaaaactccagggctctactgacacctgctggcatttcatctactttatgttaaaaaaaccccaacaagacaaagaatcattaatatttttcctgcagtcctttgcccttgttatgttacttgtactttacctgaacgataatagaaggggcctttaccatgtcgtgaggagagaagtgtgggcaagccattgggtgaaaataaaaatccccaacacgaagaatgtaccacagagctcttgttgcctgtctgccctgcaccagctgctctgtgaccttaggcaaggccattgacctcactttcatcattgcaagaagaaagaggcagcaaccttccctcccagttccctttagggcttctgaggatgctggtggcatttcctactaactaaagcatgggccctgtcactggagtgatggccttaaaggtcactctcactgacctttccatcacaataaacaagattccttgccagcgttgtatgttcaaaagatgaatgaaagttatttaagcctcttcaaagtgcaccatctctgtaatttatttcgacaaacaactaaattagaatgatcagaaaaagcccagtgaacagtctcagaaattgtccactttttttttttttgtctaggaaactatggactttgttttgtgttttagaacatgtagtaagcctgcaggttgagaaaatgcatcccagttaatgccaacccaattatttgtgctttttctgtctattcttgggaaactctgtgtgggcctgtggtttgttaggtcaataacaggatatttgatagtctgcagggagttatagtccatatttagcctgacagaggaagtgagttctgctgatgaaaaataattgaggcatttctttaattctactatttcatttcttcatcttccttcagaatcctgaccccactatgatgcttgctgaggctttcgatgctatttacagctctgcttttgctagtcacaaaagaaaatttacctcttataacccctaagtcttccctcagaaaactgttaggtgtgaccaggatcagcaaaaactgttagattcacatccattagtttggctactacttaaaaaaagaaacaaacaaacaaaaaaacccagaaaatatcaagtgttgttgaggatgtagacaaattagaaccctgagcaaaagggttcccttgttgcatttgcagtcctttgttggtgggggaaaaatggtatggccacgatgaaaaacagtatggtatttcctttaaaaattaaaaaatagaattactatatgatccagaagttccacatctggttatttatccataaataagaattgaaagcagtaacttatttgtgtatcaatattcatagcagacatgcaattcacaatggacagggagtccatcagaggtgaatggatgagtgtattattcagcctttaaaagggaagaaattccgacacatggtagagcatggatgaactttgaggactttatgctaagtgaagaaagccagtcacaaaatgacaaattctgtatggttccatttatatgaggcacctagcatagtcagaatcacagagacagaaaggagaatggtattaatatttatcaatggctgggaggagggggagatggggagttatttaatggatatggagtttcagttttgcaagatgaaaagagttctggagatggctggttatgttggttgcataacaacatgaatgtacttactgccactgaatttttcatttaaaaatggtgaaggtgataaatgttatgttatgtccatttttaacacaattaaaattaaaagaaaggttaaacagcaaaaaacaaaacaaaaccatactctgttagaacgcagtcatcacctttgcccttacagagattaaattgcttgactttttaaaacctggttctactgggcagtgctgtccaacagtcccatctgtgatgatggaaattatctgcactgtctgagccatcaaccccatgttgatgtttaagcatgtaaaatgtgattagtgcaaatgagacactgaactttatatttattaaatttaaatagccatatgtgtctagtggataccatactagacagtgcatatagagtatacgtctatattactatctattccaagatatttttccttcctcagcactaagccgcaaatctaagcagtcaggctgtaaacctaagaaggtaaggaatcagcttatgtgtgggccaccgttctatttaacccaaatgtcaatttgctacgaagtgttttgccgagggtatgattcttctatggcattcattggcatcagtttttggacccaagggcagagttggccttaattcatgggctgagcttttctagtaaatgcccttttagagacccaaattcctctactgccatgcacaatttcccttcacttgtccttgtaaaacagtggagtgatggtatgaactacaagtgaggtccaagtccttatacagaaattatgtgagcacatcgctgtttgctctgatcaccctggcaatgaaagaatgtttttctttttaaggctttgctggaaaacataggtaagataagtaacaaactcttagattgaaaggatcacacaataaaattgatgaacccctattcatttatcctctaaagtgaaaatagttaaatatgtcatgtattttataatgctggttggaaataattaagattgccagcaactgaaaaagggcttatatttaaacaagctgcaaatagaaagcttcacaagtcagtcagtgggcaacattcctttgtggcagcccagagtttaatggcacaatagatggcacatttgtcttcatggaaagaatgaaagctgtttattaaagaataaaatatgagcctgcaaaatatagatggctgtgtgacaggaaagggacaaaagaagagtttgtgtttttattacacaaaatggatacaatctatctaataaaaactgctctatttgactccagcagatttgctcaccaagaatattttttctttctctttcagcaatgggtagaaggcctgagatcaatcatacacaacttcagggccaacaacgtcagtccaatgacatgcctcaagaaacagtgagtgttgtttgcattactcgtttttcttggcagttatcaaacaaatggtcagatgaagagatgaaggctaggtggttccttcctccaaattcctgcttgcctttccctccatgctcctgaccttggagttgaccaacacacacctgtactcttcataccacgtagaaaggcatgcatgataaacccatagcccaaaacctatatgaaaagaatagttgatggtcaaaggacactggaacctcagtcactctgtatgctgtcagttgtgggtactggcttttgtgtccccagattgagttttctgatagacagctctgcatgtctggagccatcgctgagtgctggggtaattctatcctctgctgcataaaactgagaaatgaggagtgtgaccaagagacgcacttgccaatgcacctgaaaaagaagcctcagccccaagtgcagtgctccttgtttagcacaccgtcagggatccaaagttacctctgaatttttttctgtaggattcagttatttaaagatttgatcaaggatccaatggtgatttccaaatttattttttccatgaaagaaggaattactccagcttacagtatctgaaatccagaggagtactacagtggtagatttaaaccctacccaagttaacctttcaaggtgacatgaaaatcacccacaaaggaatcctagccaaagtcaaatgtcagccagtttgaaaagcagtgatccgtgaaggtgggggccatctgccttcacagggccattggcaggcagttgtgaggtgccaaggggaaccatgttgagaaattgcagggataagcctgtatctctcaaaattatgccccagcaccaagagtgtgattcatcatactcacttggcaatgggccaagaggttagtcctaaaggtactgtcatgtcttatcttctggtcattgtggcaggtgcttacaggtgtggtctctaggctataaatcccggcttcaccatggcaaattcttacacttgtgcctcactgtcctcatctgtgaatcaaaattaccatgcagatgaaattggaaagtattctttattcaatactacttatcttgttatggtatccctccaattttctttcacccttttagtggaggaaagttatttagtcttatctatttctatgtgttgtgcagctgcttcttcttttcctctgcagttgccctggcatgtgtttttaaagagaaacccagtggatattctgatgttatgacttcaggcactgatagtcctaaagggtcaaaaacttttagaaggcttgcttatacctgagtgacacaaatatctctatctgacatgagatctaacaacatcctgcccagatccctttatgaagctggtgttcacccagccatcatctgccatgagaatgggctcaccaagggctcagacctgtccacttcttcagagcattgccctctgctgaaggggagcttccattcctggaagattatactcttccctcctccaggaggaagtccacagccaatgatgagctgcaacagggtacagaaggccatccctcttgccgccaagtctggcacaaatcacatgagttcaagctaaatcaagctccatctgaaaccacaactttgtttaactcttttttctgctcagtcttctctcactctcttcatccctaaaacatcccgttattaaagtagttagtggtgcttctacgaaacttaagacagaaactttactaaatcatcatgttctgcaaattgttagcacattattgattggaaacaggaagaatgggagtcattagctaagaaaagtcctagctccaaagtacagataaatgttctgagtctcctaaaagcctggggaaagcaaggaatttttcaccatcaatttgagttgatgaactagtcttaccactggaaattaaggaggcgcccatgtgatcagtacttggcagcactaggagctgggagtgatgagtcctcatgaattctcaagacaaggctggctgctgtcaccgtgcagttgcatttcccaccaccttaatatattattacagagcaataatcgagcagaccaatcacaaataagtaccaacaatgtgttttgctcaatggaggcacccagtcatctcatttagctagggttgccagataaaatagaggacacttagttaaatatgaattttagataagaaacaaaaatattttagtataagtatatcctatggaatgtttggagcatacttacagtaaaagaaaattacctgttgtttttctgaaattcaagtttaactgagagctctatatatttatgtgctaaatctgacaaccctaaattcatcttatagcacataattgtctgattttcagaaccaatgttcttgatttaaatgaactttcttttaaagttcttaacagaattgaagctgctccctctaagaaacattaaggcaatgttattgctattgttttgcagctggatgaaattggcatttatgaccaacacaaatggtaaaattccagttaggaggtaagtaatcattcctatctgctgtccgtgtcccgggtcaacgcttgtcatcccaaaccaaagagagaacccttcacaagtatttgtgtgttaaatgctttaaagatatttctggaatcttagtttcaattgctttgacaaatgctatattcagtttgtaaaaatcatttatggaagtaaaactgcatttttttggtcaaaataggtggcaaaagaggtactttgacaatttaaagaacatcagaaaatgtagaactattttttaaaatcggcaaataagtggtttttaggatttatgtttcttttgcttatttgccatgagaaactgttagctaaacttaaagaagattttattgtgcacctactgtggaagggtgtggaccgtgtcttgagaagtgtgatgcctctgaacagagcattttcattctgggctttgctgctcctctggtgctcagggcagatggggatacttctctggcttcgtgctgcctactctctacatgtactgtaactgacaccacacactctgtggagctatcctttccacctttgccctgatgcaggtaacaatgacaaagaataaaaaggcttgaggcagggcatggtggctcatacctgtaatcccagcactttgggaggccgcagcgggtggatcacaggtcaggagatcaacaccatccctgctaacacagtgaaactccgtctctactaaaaatacaaaaagaaaaaaaaaattagccgggtgtggtggcaggcacctgtagtcccagctactgggaggctgaggcaggagaatggcatggaacctggaggcagagcttgcagtgagtcgagatggcaccactgcactccagcctgggtgacagagtgagactccatctcaaaaaaaaaaaaaaaaaaaaaagacttgagtggaatcaagaataaagaaaacatggacaggatacatcctccacatgtgttctttaatacttaagtggacagatttcaccctctgaggattccccatgcatccctcttttctgcttctcacttccttccaggggttagggtttacacatggtctctgggtacagttggaaactctttccacagtagtgatgggaattctttaccaaactcttcagtacctttttggttggtgtttgttttaagcattcatggaaattccagaagctgggctgggccccagggcatctgcttttcacatgaagacaggcatgtatctggattcgtgaacctaagcccacaaccagaatcaaacatgggttccccagatgccaactctctcttccagggttctccagactcaggttcatgttcacttctctggacaccactttagcaaatacgcaaatcaacaaataataacaaacaaaacccagaactactgggtggaatcctgtcttagaattgatctgtctttcagaaataaccaggtcaccgagtgcgtagcatctgtgtggatgcattgagcagtggcatgtgctgtggctcctggcatttctgactctcctttgcctccttccctgcccagctgcttcattctgctctgcagcttccattctgcatccctgtgagactatctccatactcccttgacattactcttttcatatttaacagaattgtcccagaagacctcatttttctcaatcttgtatattaaacaatcacgacctaaagtatccatgtgaccacttaaatatcgagaaaatgtaaagcacagaagtcatgaagaccttagacaattttttttaaatttaactctttattgagggcttgttgagtcatggacctcatgcatttgttgtggtctttccaaatctatctgtaggattctctgcttttatttaataacttgctagcaagtcaacttttagtctgctttagaagattgaaaaaagccctgttagcagccttgactgatggttgttggcagatactttatgcttatccttatttaaaatcctttgctcagttgagtaatagcagaacaattattttaatgtatcccagtaccctacagctattgcatttttatttaaaatcagagagcacaaagcagtgtgaagaatagaaatgtaggttggatgtgtttttacatgccttactatcctgctttttcttccaagatgaggttcaggaaatgggcaaagtagagacacatagattgtgatcaaagcacttctaaccagcagtcttggtttcatttgtatgtatcctatgaatcaagtcattgtcatacaagctttgaagtcgtttctgattccagtgatttttatctaacatgttcacatacaaaattattaccacctttttgtagaaatagcttagatattttggcatcttctttagctctctttgacatggactccatggtgcttgccagtattaacaggtgtttgacacaagacggctgtgatttgggggcagtttgttagagttgatggagaattgataccatgccagaaaaaaaatcagataactctattggtgaatgagctgccaagagttagttggaaattgttgtgtatgttttaatggatatgaagagtaaacacttttaaaatgttattcactatcattctgaagtttctaaaatggaaactattagtgtactgtccataatattaaaagagatctggcttcatagtgattacatagcttgggaatggttcctgctctttagcattaaaccaaaatttaatatccaggaagttgcaggaataacacatgaagaaagtcttaccttttgtctccctcttctcttgtcttgctgtttacataacccatgcagtctgcctttctctcaaattcacaaatttacactcagtttatcctcccactcagaccaaagttttggaaatagcaattctcttttgccaccttccctcctctctcgtaacctggagtgaacaccaatgactagaaaattgggaagtgagtagccagacagtagttgtgggcaggggctggaagagatcccaaacaaaacggctgtgttaaagaaggctgagagccgcaggtgccgtcttggaagcatccctatataatcagcccaaccatgtcctgaaggcccagcagcccacgaagaaggtatgattctgctggggcagttgccccatccttcactcaagagttctctgtaactttcagaacacggtgttaaaaccatcgtgtagattgcagaccctgtttcagctagcaaagagtgggactcccttagtttctaggatcgttgctgttttagccacttgcgaagtcccccggaatagaatttaaccaggactctaataggactggacacaactcaggggtgtttgcttttgtagcatttcttttggggaatgggggtggtttagtttgattcaacaaaaactcattgagtaccagttagctatgaggcactaagcttatgtgaacatggggctatatagagatttgagtaaatcacattccctttgtaaatgctctatgttcccatgaaacacagccacgatattatctcccttcttggccccctccatctcccttccccttgagacattcttctactttctatttgttggcacctggccaaaccctagccaaaagattcaatttctgtgtaggaaacagaagctattggtacccaggttctgtttcaccagaaaggctcagtctccacacccgctgatttcatgcccacgttgatcagttttcatctcgttatgccaggcatgtccaaacctaacagaggcttcagttagctgggatacccctgagattgctatgcaaagattgttctcctgagagcaaatgccagatcctgccagagtcttactagctaggttaacacaaactttttatgaaataatagtcaccctgaacagctactttcccctaaattaaaaaggctacaaaatttttgtcttaccccaaatttaatgtataaaaattacctgaactctagagatgaaaaatgtaaacatagcaccctctatactaggaatcttaaccatttattgatgtcacacacatattctctcccatatttgtagatttgttaaagagaattcacaggcctccttatatttgaatacaactgtctcaagaactcttaaaaatgtacttcttgaagtattcttggacctggcatgaaacaataaagctgtgaatgaacacataattcatttacctacagctacttcttagtctattttgggaagtcctactctgccactgaagtggtgctttctcccactcaggaagaggaactgtcagcactctcattcagaacttgccttctacttagcacggatggcggaaagtacaaaaacgctgggcatgagatgctgttaaaaatccttctgtgctcacaggggaggcattccaaagccagccctcatggatagaagtaaaactccatcctcaagtcaagctggacttctgaatgtcgagttaaaatgaaattatcatggtaacacattacctgggcttccaatcagggagcgattgaaggctccttggtggctaaggtatggctcagagccaagtgtggtgttccagggtaccaagtcctctgctcaatagctttcattctgagtggcaccaacacatttataatggagagtctctcctaacttttatcatcaccaggaagtgtgttcatcaaggtgttatctattctactagccttgatgctcactgttctagttaaaaggctatccaaaaatactatgtcttggggtactactgagatttgttgaaacattggataattgttccccttccccctcacccaacccatcatgttgacagtaaagtcccttatccttgaggcagctgacatttcagaggggctcaagggtgcttagcttgaaaacaagaacaaaatatgtctgatcacgcccgtgtcaactgtggttaagtgtgggaaccaggataaggacaactgaaggcatggattgagttgtaaggggccgcctccttttccctaggcccagttattgtcaacatgagggtttgttctagagctactgtcttatctgccacattcctttttcataagaaggcaatttggtagcatcagaatttatcattgtttttgtccaaaaatgtgtgtcccaggccaggcgctgtggctcatgcctgtaatcctagcactttgggaggccgaggtgggtggatcacctgaggtcaggagtttgagaccagcctcaccaatatgatgaaaccccgtctctactaaaaatacaaaaaattagccaggtgtggtggcgtgcacctgtagtcccagctacttgggaggctgaggcgggagaattgcttgaacctgggatgcagaggttgcagtgagctgagatagcgccactgcactccagcctaggtgacagagtgagactctgtctcaaaaaataaaaaataaaaaataaatgtgtgtccctccagtgccgcttgccccttgttctcccaagcaccagggggacccctggtcttagattcaagttgcatcactagactaaccagctctgggaaccagagggacactggaggaactagtttgggaaatgaaaaacatctgcaatgagaggtaattttattctcctcttccttttaccctagtctcactctccatagtaggacctggatctttgcatcagagaaaacataatgaacaataactggaatgtgtgtttctttcttttctgccctagtattactagaacatttgcatcgggaaaaacagaaaaggtgatctttcaagcactcaaggagttaggtcttcccagtggaaaggtatgcattaacttaataatgtatttctaaaaccattttgtttatttatcttctcatatgtaatgagctagattatttatattaaactgatctaaattagatttggaattatatgtcagtgacatatagtacagttaattttcttttctttcttcttcctccctctcccttcctctctccctccctcctttccttcctcccttccttccttttgttgcctgggcattttaacctaaatctctaaaaatgtaaatagtttgcttcaaatgatttttgtcacctttcttaagaaaaggaaatgaaggccagcttgctgtgttacacagtttttattttagagaagctcaccaacactgcctcaaccaggcacaacattagcatgaataattaactaataaattcaattctacaagatggctatgcaatattttgtgaagcatctctccccgcaccatttgtattcatggcccttcaaatttaaaataattgaaattaatttattgacttgaagaaagattgaagcctggtactattttaataagtcctatttgaaatataaatttcagtttgaaaagtaaaatcttacatggttaccctaagcccgttcacatggtcttgcaaaaattcacaaaataagcataattaaaccttgggcttgatttattcagcatccctcaggcaggcacttttctccctcaaggtgagttggaggaaatatttatattcgttctttggggtatttcccagagcaaggccagctgtagccaggtgttcgcacacacagaatctggcagcatgataactagaaacactgatgtacacgcactgttttttagtgagatggcctggcagtgcctggaagttggcctcctggcttctgtcagcaggaatcagagatgaagaccctgagtccaagtggtcttcactgtgcttcatgaccctgtagcttctcaccctccaagggaaaaacggttctgtgattcataacatgattttattccttacagaatgatgaaattgagcccacagcattttcttatgaaaagttctatgaactgacacaaaagatttgtcctcggacagatatagaagatcttttcaaaaaaatgtaagttccacttatgaggaagtgccatataaatattatcactgtccttttcgattttttaaaacgtttttgtcctattttaatagagtatgttggtagcatctaggaatatctagtcagggttacatttttaaccccatactttatcagtgtaaaagttcactctgagtttttgagaaacttttacgtatattaattgcagcacctggaacttttttttgcattggctttactaactacctacaattttaacctgctcctttaggtattaacccattatgtgaactaactagattcaatttggaatgttaatatgtttttgaaaagttgattcattccaattatttcaaatggatgacttacatgttgtttttgaaataatatcttttgaaaacggtaaaaaaaaaaaaaaattgcagactttttctgtgacctagtgggagtgttttccttctgttgttgttgttgttgttgttttatttttctccctttatgaacagtctctggccattttaagaattcaccactacttcagggttagaaaataagtttagaattatcatcaacaaatgtcaacatgtaaatcgtacatactgtagcatcatatacaaaaacttactttttctaataaatttcttttcagcaatggagacaaaactgattatttaacggtagaccaattagtgagctttctaaatgaagtaagctttttcatacattaactccataaagtctgtgtgcagtggcttgccttctctggtgtcctcattgcatgcctgcatcatatgcccttattcgctttgcttctgacctgctgatctttccattatggctttaccaggtgcaaaaatcagctgccgccctgtgtgttcatgtgctttcttcacattggctttgcacaccactttttgttggtttctggctgttacatgtagctctggttctgtgtgtatgtgtgaattgtataatatattcatttaagtaaatgtgtctgtgtttttgcaagatgatatttaaggtactttttttctattgatctcattaaatagaaagagaatggattgagtttactacactgtagttggattctccattgctaactttatctcatacctttgcatggactggaaagctttatttttgtcttttaatggattgcatgtaagaaaaatatgttggctcaaatagaatattttgacaacaagcaaaacacttgagttcctgggtgaaaatacattgagttttaggctaataggattgcaggttaaatttgtactttttctttttataacaagctcagagctaattttagaatgtgattaacttaacaaccaaaactgatagatagaattgcttaagcacaagagaaaaatattttcgaacaaaaaaagtttgcaacttttattacaactaaaatgaactacttttttcttcacacatacaaaaaaagttttcccttcagtgaaacccatcaagactcttgttaatccaaaatggaaaattcacttttttttctaacacattaataagagtttgagtgaaggatggacagtatgcttttgtttcaaaataatttaagttaatcattataccatataaagagaaaatgcaagaaaagatggtatcatgccagataaaacgtattatcttaagaaaagataaaaaggcagaccttaatttgccacttcatagagacaaattacatcttcttttcttccgttgtgaaggttcagtggcttcaaatttataaaggtcgcactttagaaactatgttaactaaagtgtaaatgcactgatgcaagaaagagaaaatcctaccccacatatcagacagatgcctctaaaataatccttcgtgtacaatacaatgtttattttactcgaaaacatttcaaatttttccactccactggtttttagtcatataaatacaatgttcataatctttacccagatactatccacgttcttatgccacagctgctcagaagttaaattgctttgttttgtttctttaaccccttccccttcttctgccttttgttttttggtttcttgttttgttttgttttatatcccttggcttcttcatgcactttggttcagtgatcatcttaggtttggtgaggtgaagagggaagacggtttagtgtaaaggagaaaatctaccacatcttcagtttgccacttccaagacaaggcctcttgtgttctttgggatgaagccctctcttaaacattacagagaccttaatactgcatttcactgttaaagaatgaagcaactcttaggtcttgaggataagtgcagtatttataggctcttatctaatgcatttccttttatgggttgtttttgttggtgctcccaacagtcactcctgtaattcttagacataacatttaattttttaaaaatatcatcatccatactttcttgttctgccattcagattctttctttaagtatttattatttgtcaaccttttatccctcacaattacagtagacaatagtattcttttttttaatagtgtttccttctatttgatgtcttcttaacattaaggaagtaccttaaattttggggtgtgactgatggaatcggtgtgattctagatttctttaggtcataggaactgtaagactactcaggaaagtctatagcctttatttttaatccaagtgtctgccctgaatttattccttttctatcctagtgaactcaactggaagaactagacaaaaacatgaatgtcggcttgaagaagccttgtcaaacatagagaacattctgcctgttccttgcactccctcttttgagtcctaccctggcccctcttatctctccaaaatcaaaaacaccccttgggcagaacaacttcaatactcataacaaaaggagacagacagagctcactcaagaaagaatgggcattggaatgtaagggtcaattactccaagagtttaaacctaaacattttcaaaatgccttagccacatagtctcaacaagccagtattcaacactgcattggaagcccctgtgaaggttccttgtgaaggttcaatggcttcaaatttataaagcttgcactttagaaactctgttaactgaagtgtaaatgcactgatgcaagaaagagcaagtactaccccacatatcagacagatgcctctacttttaaataatcctttgagtatgatacgatgtttattttacttgaaaatatttcaagtttttccactccactggttcatataatgagacaaaaaaataaacaagtcccatgaacactggaaaggacaaggtcctagtctcatttgcagatgttgattgtctactctgatataaacaattccacggaaaaactgtttgaagtaattagagagttcagcaaggtaaccagagaaacaatgagcaaagcaaaaacctggagacacacatacactgccattaaccaggtagaatagatagtaggaaaacataaatcccatttatattagcaaaagacatgctggttcctaccaccttccagctggttaatcctttcactctttctatgaaagtttttattcatatactaatgtgtatcttcagggggctgcaaggagaggagagactatatatatagtccatttactgctttggtcaccctgtagggtgacctcctccctatccatgcaatcaacactgactagattttcagtagtagctttagacctgactcctcattggcttctcagtatttccttgttcgttgctccccaaagtgtgatccatggaccagcagcatcggcaccccttgggagcttattagaaatgctcagtcttgggtcccacccagacctgctgagtcagagtctgaatttaacaagatctccaggtgatttatctgcacattcaagtttgtaaagcaccatcctagtggattactggattcctccttggaatgtttagtgtgagtgggaagaatatgagagcgacatataccttctgttattctccattaagaatttagccataggaatccaccactcagagctaaaattttgccacatctatgtctcttagtctcatccaatggactgagggaaatcttctttgcctataatatgaaaatagcaaactagagtccaggagggatagcagaggcacttaatgtgagctgccacgtggtgagacactactactggctcaattgcttgtatgtggcaagactagataaaacctcttggctttggttagttttacctccctttccctattcctaatgagaagcaaaattgatttttagttttaccttcattctttgtttgacttcttacaaagatgataactagggtcctgcagaattgggagatgggtggagggcaggagagagggataaaaacaaggaagagagggaaaaggccttaggtggccacaggaatcaaggagtagctttactttcttgttgctggtaatcttcccccttcctcacacatatcataggatcacatcagggctcaacctgacttttttctttttgcagatgaaagaatattttaaaaggacccatgatctctttccttttacaagatctttatgctttaaatgcacaggcaaagagagagaaggagggtatttagtcttatgagtaagcttatccttgccaattattccttctatatttttaaaatattatttatgtcaacattcatctctcccagtgctacttggattgaagccagacgatgcctcttctcagcaccagtaaggacgtaatactggagttctcttcatctcctccttacttacttggacacagttctgtgacctatttttggaagtcatttagaatctcattttacaaagcactggataccatggggtgaataacctgagtaacttgtttccccaaatcctggctgaaaactgatggttcctcagagatgtgaaacattcacctcactgtgcttgtgtctctgtggaactctactgcagccttattactgtgagatcagctggaagtgatccttctcctcttgtttttccatatgaaaatgatagttttctgactctaatgcaaatcttatatttgtttccttgcctttggattacccagattgatttgtgttacctttttgaagcatgaagattttagggagagctgaagattgttatctagtgggagcagaagcaaaaacaaatgcaatttcgcattgtctgcacttcatgcttatttgctgcgaatgtaattttcagaataggggattatgatacatccattttagggcttggttttcctggctttgttttgccataggcaggatggtctaatgaatgtcataccctctgactaaattttaatagtgtttaattgggaggacatctgaaacactgaacatgcttctatccttgtgagacttaggtacttttctttttactgatgtgcaaatatgttaaaatgcatacctttatatgttaggtaaagtgattcttatacttgagcacatcagaattactcagaagtcttatgaaaaacacagattaataggttccaccccagagatcagcagattcagtagatctagggagggacctgagaagctgcatttctagcaagttgacaggtgttggtgaggctgatgctgccatccacagatcacacttcaggtagtaccttgtcagaataaacacatgtatgtatattttaaaatgcacaaaaatgtctgagttctgtctcctttcctaattttatctcttctctctcctgtagctgaatcccttttttctctcattttttaattcatatggatttgcctcatcatctccatgagttcaaaatatttaccaacaaacatatttttaaatttaaaaaacttaattttaataaggaagataaataaagtggccacctatgaacataacagtgctggggtctaaaaaggacctttttcatcctttatccatcttctaccatgatattatttatggagatgtgagaagggatgtgcctagaaagatgggtttgttgttgttgtcagtttgtttgtttttaaaacaatgcattctcaccagaaagacggagctccttgtttccttgagtagtgggctccattgcacgatggcatcaatttcctaaacaaggtgtagcatgccttcacttgcctggcattccatggtccacctcacaatcctcttccctgcatatcccataacttttgttcttggtggcctcgaggcctgctgttaacataacagtttctgttgtagcatatgcatgaatgttagctgttgtgagccataatttcttagattacaacagaagcatgcttcattgggataaattgatgaaatttgatattgattccttatgagttaatgctcttaactcggtgggggaggaggggacccagaaaaggctgggccccatatgcatgaggaaatgacatccaagtgctctgttggccaaaagcattcattctgtgtatagctcacttttccaatgcccattccaaagcaaatagggaagggaaatccatatgaacttttaacagttgctttttaaatacctttccaacaatgtttttcagtccgtgcatatatttgggtaaagagttgtcaccaaggtcctatttattgaccaggttttgctcacacctgcttatctgtcattattccaaacttccattgaggtttgctttatttattcacttattcattatttttgtaagggctgaccagggacacagtgctgtcctctaatcctcagtgaacagaaaggaagtttagtggacccactgccaacacacatacacacacaaacacacactattggagctgagtaagttagtaaactgggtttttcatcattgccatgaagttaggatgataccattgcagggacagcattgctcctggtgcctcatgtcatagcaggagctccttaggtgtcaatttgaaaacaataatgtcaccaacctcttaagtcccgtaatcattcatggactctctgcccagagaattctatattgtttatagcttgtaaatatgcttgtactgattaattttcatcattacaattggttcgttttgaaaaaaatagttactcaagaaaatgaaatttgttgagtgcccaagaaatcatggattgatgtagaaaggtgttatgaaaaagagatgatgtttgcctgtgtaacattaggctttttgttgttattgcttttggggtttttgaggggtgcacttaaattagtatattacctatttgaactattttggggggttggtgtttgctttttaaaaatattttgacctcacgttttatagatattcatgccaaatgtcttccctgttgtgtgggaactggaagacagtacaattgacatgcacactttattatgtatccttcaacttttgaaggggaaaaaatgtattctctctctctctctagttcagggagagtaacccaaaagtattcccaaatgtggactttttgaagtatactttaaggagaaaggcaggaaggcagtgaggtcctatctttgtaattataaacatgacagtctagatatattttgttttataaattataaacttagtaatgtctaatgcctcaaggccaagaaatatcaacctaaatggagttattttcttatcatagcatcaacgagatcctcgattgaatgaaattttatttccattttatgatgccaaaagggcaatgcagatcattgagatgtatgaacctgatgaagatttgaagaaaaaaggtaataaacatgaaaaaaggacttaaaaaaaaaaacaagaaaagatgcaacttttaaagccttggtttatttaaaggtatctgtaaatgctttgcaactccctgagccatggattgatgactatttttttttcctgctcttaagttcgtataaattttacctttcatcagaattagtcaatcctgactgaagtatactgttacatttattgtattattaaatacattatagtgatgtttccccatgtactttcttgtattagattttagtattgcatattgcttgaaatattaaaacaaccaatacagtctctacttgcaatccttgaaaataatttttgtcatataaaaacttataccttttctttttctcccttttgttttgccaagccaaataaatttaatacgtgatttgatgtgcagtaaccctcatttgacctctggtatgaaagataaatacaattgatatgaaattaaatagtcaggaatcgccttagctaattgctggacctttgtccctttcaaagaagctttggaaacaaagggttgttcgcacaaatatttgtcaaaggaaaggcatggggagaaattttaaaatcagtcccacagcagtgagaaatgcctgcggaacatgggagggagagctgggggtacctgagctagagcctttggcgttatgtctcagtggagaatgtaaagagatgaaagttcaagttccataggtcccgtatgtccgtgaatctcaaggtctcagtttcctcctttttaaaatctatttttttctttgtatctaatgccagtgagtgtggttgaatggtctgtatgttatctggaccctctttttaggtatacctggccctctacactccatgatttcacccctgatatttttccaagcccaatagttttccctttagttgtagttgtacagtttacactttctgctatggctgaagatacctattttaagcaagaatgcttcattccttccctctctgtcaatattctgaatatcataatttatttcacattgcttatgattacagcaaagggaggtacagcttggtagaaaatctaacacttcgcattggcaggaggtgatatgattcttgtcacttccctgtgaccttgagctaggaactggcctcctgggcctcagtttccctgcttgtaaggtggtggggctcatgcagtaatttggctagtatttcccttccctaccttcattctttgaagtttgtagagggctgaccgggtgccaagcactgtgccagatgctaggaattcaaaacaataagaaatgtccccagccttgaaggcagttgcgatctgttcaaggagaaagacaagtgattcaacaattccttggcagtgtgataaatgtcatgattgaggtgtgtccttgtttatttccaaattccttctaagttttaaaggtctatgaagtgaccattgacacatctaaaaagggtagcttgaccatttcacaagtgatggaaattttaacgtctgtcattttcaagtgtgggtgagaatggagtacaaagccattcttataaacttctggtaagaccctacattggtacaaccatcttggggaatattttggcaatagtttataaagtgaaaaatatgcctcttatacagcccagcattttcacttctaggtatgtaccctagagaatctctcatctatttcccaaactctggataccagagcggcacagttctcagatctctgctccacctatattcactctgtacctgagctcatccaagccaatggctttacatttcttctattaaactctccagtcctaacctccagcttacactacagacttgtagtagaactctccatctggatgttgaatgggcatttccaatgtatatatacaacatatttcgatccttcctacccctagatatgttcctttcaaagcctataaaatagtaccgttatttacccagtcaaaaccactgggctcatgttggacttgtttcattctttcacatcatgtctggttcatttgcaaaacctgtaagatccagcctcaaaagaaatcctaaataaatcacttctcaccatctccaacattactgactatccaaaccttcatcatccctctccaggcaatgccttctccttcctactcagtgccctacaatttatggtccacacagcagccagagtaaaccttttaaaaccaaatctaatcatgttattccaccctttgaaaccctccaaaggcttcccaacacatttagaataaaatctaaaatacttagtgaggactaaagcccaagtgatgtagcctttggctccatctccaatctcacttcaagctacctttttccttggtcacttgctctgtcttgctgtcattgaatgatgttggcacgcatacatctgcatcaaggtctttgcacttgatgatccttctgcctggactggtgtttcctgggtgtgcacgtggcttgctcctcacacatgtacgtgacctcagaagggctttcactggcccatatttaacacagcatcctgccatgcttcatcaccttcctccctgctttctctgtccttctagtacctctttgacattatatttatttgtttacttatttgtttctgtcactcataatatgagagtttcatgaaggcagggcttacctgtttcttctatcactgcatctatcctggtgcctctaaaagtacttgctctttagaatgaatgaaggtgcccaaggaaagaggtatacaaatttctactttcatttataattagaaatgacctaactatccatcaaccaaataatggataataaattatgatatattcatatatggacttctgtaccttcagtgaaaaataaatgaacaagatctacctacatagctggtatataaagataaaaatagcaagttgcaaatgcacacagtgggatagtttttacataaaattaaaaacagcccaaactacccgttgtttggataaatgcatatgtagtaaggttgcagaaccattttggaggtaaacaccaaaactaggatactagttatctatctggtatggaatggaattgaggtggggtatacaggatgctgcagtggcatcagaaattatgtattcttttacatgtaagtcaaataatcaaaaatgtaaatcaaataaggcaaaatgttgagatctgaccacactggtgtaggcccgtggctattcattatgctatcatctgaacacttctgtattagcttgaaatcagttcataacttgcaagttcttaaataaaacaaaaacttgaagctgtcgatgcatcaaccatttataagttgcataaatactgattgttgctcctgtagttaccacgtgggctctaccccatgtcagaaaggtgtgatcgaaatgaagggtggcttttggggccacgtttcaatgaccactgtatactcttctcaccagtcccataacctgacttttagataaaattgaaaactgaattgtttaaactcagaagcaccatcatctccaagaaaaatcccttttccaattcagtgagaacaatgtcttataattaatacattttccatttttaaagagcacctctcgtatctattctcatttcccattatgaagatcttggaagtcagataggtccagtctttttccccaattgacagaagaagaagctgagatctaggagccaaaggagtgagtagcaagagcagaacttgatacaggccccctggacccctggtcaccataactcccagtgctgtgtttctgaacttgggggaccatgtacatctgccatcatggatgtaaaagcagaataccacctgtttgtggaattcattatgttacttataatgtgcaactctcttatttcattcaagttctgacagatgaaagttcttgggaaagagactgtgaagacgtttttactcttataatttaagctgcctcagcttccatgaataaaacatgagatatgcatcttcagagctacaagtgctactaagatgttctttttcccctaggccttatatcaagtgatgggttttgcagatatctgatgtcagatgaaaacgccccagtcttcctagatcgtttagaactttaccaagaaatggaccatcctctggctcactacttcatcagttcttcccataacacttatctcactggcagacagttcggcgggaagtcttcggtagaaatgtacagacaggttctcctggctggttgcaggtgaggaactcaagatggcaatttgttttttgtgtgtgatgcccttcagtttaatttacttttctctgaaaaacaggaaatagtaatcaggatgaaaaggaaatttgtttattccctttaatggattatcatggtcatttaacgttgagaaaagaaggacagtatctctttcggaaaaatcttcagtcatccaaaagactttactgtgaaaagacttttctttactgtaaatttaaaatatgcctccaaaaccacaaaaaagaaaacatgcatattgtaagaaggcgtgttgagttttttgttgattataggtacttgttactagcaccatgctctaaccaattgagctaactggccattgattataggcacttgtaaattagctttttttttttttttttagtatttattgatcattcttgggtgtttctcagtttctcagagagggggatgtggcagggtcataggataatagtggagagaaggtcagcagataaacacgtgaacaaaggtctctggttttcctaggcagaggtccctgccgccttcggcagtgtttgtgtccctgggtacttgagattagggagtggtgatgactcttaactagcatgctgccttctagcatctgtttaacaaagcacatcttgtaccgcccttaatccatttaaccctgagttgacacaccacatgtttcagagagcacggggttgggggtaagattatagattaacagcatcccaaggcagaagaatttttcttagtacagaacaaaatggtgtctcctatgtcaacttcttactacacagacacagtaacaatctgatctctctttcttttccccacatttcccccttttcttttcgacaaaaccgccatcgtcatcatggcccgttctcgatggtcactgtctctttggagctgttgggtacacttcccagatggggcggcctggcagaggtgctcctcacctcccagatgatgggcggccaggcagaggtgctccccacctcccagacggggcggccgggcagaggcgctcctcacctcccagatggggtggcggctgggcagaggcgctcctcacttcccagtcgtggcggctgggcaaaggcgcttctcacatcccagacggggtggcggccgggcaaaggctctcctcacttctcagacggggcggctggcagaggcgctcctcacatcccagatggggtggcggccgggcagaggcgctcctcacctcccagatggggtggtggccgggcagaggcgctcctcacctcccagacggggcagccgggcagaggcgctcctcgcttcccagacggggcggccgggcagaggtgctcctcgcttcccagacggggcagccgggcagaggggctccccacatcccagacgatgggcagccaggcagagatgctccccacttcctagacggggtggcggccgggcagaggctgtaatcttagcacttcgggaggccaaggcaggcggctggaaggtggaggttgtggcgagccgagatcacgccactacactccagcctgggcaacactgagcattgagtgagcgagactccgtctgcaatcccagcaccccgggaggccgaggctggcagaccactcgaggtcaggagccggagaccagccccgtcaacagggcgataccccatctcctccaaaaatagaaaaaccagtcaggcgtggtggcgcacacccgcaatcccaggcacttggcaggccgaggcaggagaaccacggaagtccggggcagggaggctgcagcgagccgagaccacggcagtatagtccagcctcggcaacggagggagaccgaagaaaggagggagggggagggggagagggagagggagagggtaaattagctttatttgatgtaaaagttcaaaaatttagttctctgagagtagaaattattaaaatcgtttttgttttatagaaactggcaaatatttgagatttaaaatatggcaaaaatgatgaaagtgaaaaataagaaatgtagttacattatgtttttttcttggttataaattaaacaatactttatttttttaattcatttttttttggatatggaaatatgttaaaagaaattaactgtcttactacttccatttgcaaacttcctctgaatacctgagtatgaatcactaaacattttctgaaatggccaaagtaacattatccagcctatcaaaattaaaagtaatttttttaatttattttattttattattattatactttaagttttagggtacatatgcacaacgtgcaggtttgttatatatgtatacatgcgccatgttggtgtcctgcacccattaactcgtcatttagcattagatatatctcctaatgctatccctcccccctccccccaccccacaacagtcccatgtcatctaaaacccagcccacattcatatttccccagttgtccccaaccaaattgtccttttttttttttttaattgggacagagtcttactttgttgcccaggctggagtgcagtggcatgatgtcagctcactggaacctcccctcctgggttcaagcaattctcatgccttagcctcccaggtagctgggattacagcctcccaagtagccatcacacctggctaatttttgtatttttagtagagatggggtttcaccatgttggccaggctggtctccaactcctgacctcaagtgatccgccttcctaggacacaccacgcccggcccccaaattgtcctttattgcgttttgtcacaagtaggatttcatccagaaccatgatgcttgttatatttcttaagtctcttaatctcactcagacaatccccttttgataataccaaccagatgaggaatataatgtggttttaacctgtatatgccatgaaataatcaggttacttaatttattcaattttctgttctggaagaaaacaacttattttgatgtctttcttttaatttgtatgaacactatttcattgtaaagtttcaatattgtaacttcactatatccctagatgtgttgaacttgactgctgggatggaaaaggtgaagaccaagaaccaataataactcatggaaaagcaatgtgtacagatatcctttttaaggtaactttaaaaataattacacagacttttccaaactctgtgaaaatgcaggaaatagggagatggagaagagaaaacaaatgattcattttctcaagcattatgccttcatattcccttcttccagtcttgaggaaaaagtcaagacaaagatcttttccactgaacgtccccttcatgatactgttcttgctttcaaatggtgactgtgttacataacaaggtttctctggcagagtttacctagttttacttaccttagaaacagtgtctccttttgttatctacttatttgcttatttactttacattattcctaaaggacttcaaggtggcataaaaagataaatagaatacaggaataaaatagattgtaaatagggcctacaagaataagaaaggccgggcgtggtggctcacgcctgtaatcccagcactttgggaagccgaggcagggagatcacctgagatcaggagttggagaccagcctgaccaacatggggaaaccctgtctctaccaaaaatgcaaaattagctgggcatggtggcacatgcctgtaatctcagctactcaggaggctgaggcaggagaatggcttgaacccgagaggtggaggttgcagtgagccgagattacactgttgcattctagcctggacaacaagagtgaaactccatctcaataaataaataagtaaataataagataatgaggttagacaaatcaaaagaatgaaattctgtggtttgcaaatgtcagctgcagctgtctgtcggtttggtataactcaggatagatattacaacaccaggagcagcggttctcaactccacctacatgtgaaacatcaccatgggtattttcaaaaacataggtgctgctgggcgtggtggctcatgcctataatcccaacactttgggaggtggaggcaggtggatcacttgacgtcaggagttcaagatcagcctggccaacatggtgaaaccctgtctgtactaaaaatacaaaaattagctggtgtggtggcatgcacctgtaatcccagctgaggcagagtcaggagaattgcttgaacacaggaggcagaggttgcagtgaaaccagatcatgccattgctctccagcctcagcaacagagcgagactctgtctcaaaaaaaacacacatacacacacacgcagatgtctagatgctatgcatagtatttctcttagccaagatattggagagttttgaccagcaatgaattcaagataatacttcttgatatgtaccaagagtatattcaagtgggaagccatgaatttgcatagccaggaagaataactaaatgactacctcagccacaaggaatgcctcaataaaatatttcaagattatctaaccttgggctttatcatgtcaaatggatttgcctagataactattgtgaaatatttttctgattaactgaatgatgagatttgccctgtgattagctacaaaccagtaagaatttggggatttttaccaaatatgatgctccggttgtagaagtgctggtttgaagcctttctttctaaagctaagcagagacggggccaaccatctcttaaagcctctcctatttcatggagaatagtgaaagggaagattatgtttagctccttcaaatgttgttttctgtaattaagttctgtgttacagatggggggtcaagaacacttctatgtttcacttacatgttgcttgaccaacgagaaccccttcccccggccttgtaaccaggctaataggaaacaagggatactgcaaatgtcactttagtacacagaggtctacatcaagttaatgaagtatagcccaagactgatttccaaacacagaggaaagtcagtgaaagcctccagcagtcctgaggttactacccacacttttctgcatgaggtggggaggagtcatacagtggtcgggagtgaaaacctctgtgccagagatcacctgctcctcaagaagaaaggtggactctgaactcctggcctggcagattaacaagccacagactggcatgccatttaggtgaaatctcttgtaagttaatagcaccataattctggagaagtaaaagatagcttaaaaaattgtcattaaccattaactgcaccctggctataaccacagggaactcaacctttagaggtgtcaaggtagatgggggctccaggtctgaattgctggaattgactttctgaaagactcaattaatagtctctgaatagttttgggtgccttaatttttttgctcttttctctcattaacgtttttttttgtttttaaaggatgtaattcaagccatcaaggaaactgcatttgtcacatcagaatatcctgtaattctctcctttgaaaatcactgcaggtataatgatccattctgccacaagtctctatgtggtattgtttcctaacccctaatgcccactcctgctctacaactttttaaatagctgaatagtttgttttgtgaagtactaagttcaaataattctccagcaagggcacctactcttatgcaaagcaaaaaacaacaaaaaaaggaaaaaacgacaaaaaaccacccttgtccccccaaaccaaatcattttaatgtgtttcagaaatacttgttccaaataaaagttcagagattgggacaccttacttaaagttccattgagctggaagatttgacagtatatttgaaatcagatttgatgaacttgaaagacattttttattcttctttccagctcttagttttggaacagaatctccttctccttcttttaaaattataccagttaaagtttttgatacatctcacattagcattaagaggacaataatgcattttgccaagtgagaatctttaattgcctagtaatgggtgtttcttattcttggacggttaatgggtgtttgaatttacaaatgccacttttttctctccagcaaatatcaacagtacaagatgtccaaatattgcgaagatctatttggggatctcctgttgaaacaagcacttgaatcacatccagtatgtatttttaacaaaccatatttctagcatgaatggatttgttttgaaaatttctgaagggtcaagtagtactagaggactaatgctaaagatcttcatatttatttaaattctttggtacggaaagcttacatcatgcttcagagggatgtaaagagacacaaaataaacatctggttcaatttcatttggaggatctttgggtcttatggttttcagatctcagtcttaaagtttcataaagcacccaggccaagagtccagattcaggtcagttgttctcaaattcagttacatgttagaatcacctacaaaactgttaaaaacacctgtgccagggccccacttggagactgatttaattgatgcagggtcagccctgagcatggtgttttaaaagccctccaggtgaactgtatatgcacccggtattcagaacccatgggaggctcatgctgtggaaagtgccctggattgatgtcacgacatcctgaagttcatgttcctaactccaaaataaatcactgagtaatgttgcacatacatttttgaacttcatgttaaacctgctaatttcttcataaagcaaagaacattaacctgtgctccatagataggctttatgagatctgtgaattcattctaattgcatgcaatttttttgtatatactcattctagagagttaatcacatttttataaggatccatgacctccaagagattaagatccacaatcacaagatgttatgagctccaaggcagctaatgaaatcaaagtggaaagacctgctattgacagcagcacctgatgggctcaaacctggtagcatgaggtagtggcagaagaacatcacagcaaatgacagcaggaaggtgctttgtgctacatgtaaacactttatgaggttcttttcagaagtgtgtctatgggaactgaaaaaaaatatgagagacaaggatatctgtatcctttgtcccccttccttcttccctcgaacttgcagaagcagttgctgcaggtgacctgcccatatccttgcagtgcctcctgtttccctgaacactggcctgactttccactgccaacatccacagctttttgcctgagagtgagctctggtcactggagcctgctctgccacacatgaaagaccagcagtgccagggaattatcacccctatcccatgcttcatccctcccgaggtgggataaccctgagcacctgctcttctctgccttccagggtttcccagcaggatcgtgctccagctggctgcagtgataacacacccttgatgagctgcctgtcttctttttctcactttcccacacctctgttggagtttccttccaagtagacgacctggtgcaatactacttttctctgaggctgattttaagggaacccaaactaagaaacagctctgatttattttatttgtttttacctaggccctccatttatctttctgattaggttaaggtgattgcttttgtggaaagttcactgtattcttagtgaagtgatgtgcacatacttttaccagctgaagggtgtccaggttcttggcatcttgaacaaagaatcggacaaaatgcacaaacaaagcaagggaagaatgaagcaacaaaagcagagatttattgaaaatgaaagtacactccacagggtgggagcagcctgagcagaggggctcaagagccctgttacagaattttctggggtttaaataccctctagaggtttccattggttacttggtgtccggtctatgtaaatgaataggatgaagtaaagttataaagtcatttacttggtgtacatcctttgtaaatggagaggatatttcctgtcatagctgaagtgtttccatttgatttagttctaggaagtcagcatgaataggccttatattccctgcctcaagaccctattctcctttgaatacaggacaggtgtctggggaagcatgggtaatataaatgggaataagacctgctccaaaagctaaagagctttcaaccttgggagtgggagcaggacacaaatgtgaacacataactagaaaagaagatggcgtatggtgctttatttgttggaggtgtcctggtacaagagagatcactggggaatgggccagttataccacgctgctggaaggaaacagcatttcaacaaagggttttatttgaggcaagacagacatatgagtgcacagtgccttacatataataagtagtataaaagcaagttttgaaaatgaatggatgggtggaggggtgggtgggtgggcatatagagagatgggtggaggaatggggaatggaagactagatacaggacggttctgtagaccagaggtgatagcatacaggggcacctcctttgcagatataaatctaagcaaatgatgctgtagtcaagttcagattccaggaattggaacaactcccttcttgattcccttatcaaacctacaaaaccacaaaaccacaatctcaagtgttgagggttgggtcagcctactcagcagacaggcttactatacagcctgacacttggggggatctggggggcctctcacttgggaaagctaattctgaacccagccatcacaattgtcccttgcactttaccagatacttaaaaggtgcaaggccctctggggagcaggaacccctccccggcacatcccaggccagacccctgctccactggggaggttggagcagctctgcacacctctggaaactatgtggatttcaagtttgcagcactagtctaaggaaaagctcaatgggtgtgctaatttgggttggggagtgaaaacagaaggctgtgccgcctgccatctagtgggtgttgggttgcatcactcccaggcctcccaggctcctcctggactgggaaggagaatggagaagcacagcccttccttaattcagctctttctgtttctctctagcttgaaccaggcagggctttgccatcccccaatgacctcaaaagaaaaatactcataaaaaacaagcggctgaaacctgaagttgaaaaaagtaagtgaaacacacacatttataatggaagcatacataacatgtgtggacatttcagctgttgagaattcaatttattttaaaaccactgatttttgggggaagggtgtaggggtgatgttacaggtacttttcagagcaagattgccacatttccatttaaatttaatttccatatcaattaattcatgcagtaggaaaagcatatctatatattcaaatgccagaatttggagagggcccaaggaaaattgagaggaaagtagaagcattttagaatttctcaagatataaggaaccagcattttataattttatacactctaaagtcctcataagtttcccttttcagtttgccccgtgctctatacctatctagggatactaggtacatatgagtgtgtgactgtgtatatgtgaatagagagatctagagacaaatgattttatataaacatgtttccttttattctcccaggatgatttccttgaaaatattttctttcagagtatatcctagttcagtgaattaatggtatcaaatattggcatgattacacttcattttccccccaagtattctaaatgaaaaattttaaattatgttaatgacagtttattttattacaaaagcaataatgccatagaaaaatcaagacaatgaaaagtgtaagaaagtaacagcactaacatatattatacacgtattcatatactatagacacatgtacgtaatgtacatgtgtagatatatacccacatttttaacatgactgagatcatattaatgatactgagtttaaatttttaaaatttaaccaagtaagtatacttacatcagcaggatatacatctacatactaactttaatcctaatgtatgaaacactatatagaatttaatatatatgacatagaattgtatgcatttattatagcatgatgtaacgagtcccaagttgatggattttcactactataaacatgcttgaatgttattttgtatgtttgtgcaaccctctccttgaaatcaattggtgcaattagagttattcagccaaaacgtatatatattttatattgtgatatagtttgttatgctttcttttaggaaagttctaccaccttagactcttcaccagtcatatatgagagtgcctgtttcccaccaatatccttaatgctggctgttggccatttttaaatgtgtgtccaactcatagaaaaaaattggtaccttaggggtttttttatttgtgtgtcttcaataactccttttttgcatattactatttgtggtttgtccctatgtgttttcccatttttattattttgtttacctttatctttctgacttatagaaaaattatttagtcttattttgtatagtaggatataatccccattaaatcagttgcaaatattttttcctgaagttttgttgccaacctgcctattttctatcagttccccataactgttcgtaaaccttggtctgtgccagattctccaaattatgggcttttgttatctagccttaaatccttcacgaggactgaacctcctctcaaacttggtgaccagaattttgggcatttcacccatgtccccgcaattcttcatcatgtgtatataaggtggttgttgcaggtttcttacaaggtcgagaccaccaggaaatggcgagagagagatcactgctgaaccttagaaacatggtgccttggtgcctgaacattctatttcttctctcttttcacgtcctcctcagtgtcgatctcaaggcctagggtttgtatgttacctagcatctgtcaccatctctttgcgtgtttttgctaacagaacagctggaagctttgagaagcatgatggaagctggagaatctgcctccccagcaaacatcttagaggacgataatgaagaggagatcgaaagtggtgagctgtttgcttttattttaagttacatgctttgaaaatactttttaaataagaaaaccaggctgggcacagtggctcaagcccataatcccagcacttggggaggccaaggtgggaggattgcttgagcccaggagttcaagaccagcctgggcaacattttcgtagagatgagaccccatgtctacaaaaaataaaatattagccagacgtggtggcctgtgtctgtagtcccagctactggggaggctgaggcagtaggatcccttgagcccagaggttcaaggctgcagtgagctatatgtaatcctaccactgcactccaggctggacaacagactgaggccttgtttcaaaaataaatgagtaagaaaaccaggaatttctttcagaagacccttttatataataatgccgttttaattcctcatagtaatattttggtattcttggtattttgccaaacacttcccattttttctggctactaaattttaatggccttgtcatctcccttcctattggccattcagctattcagcagaaattcttagccagagaatccctgaagcacttgctgtagtaggcagaggaagcaatataaggcacattttgtaatccctttgtatagacaaaaacatgaacttgagtctgttaatgatgagagtagagaggcaaataatttaagagaccctcaggcaaatgattggtttgtctccacaaagtgaactagaaactaaaagccagtattaaaatttcaagttcaaattccttcaaataaccagctcaccagaattatctctgtgtagctagataattttaagaaggcagtcttgcttaaaatatttgagtatgtgctattaccttctcttttactttgatcacatagcaacaatcataatgttcagttgtaaatgggtcatttgagagtttggggatgattttagagaattatttgtttgttatgtttcatgagaattgatgaacgaaatgacaaggacttgtgttggttatacaatgccttggatttatatacaggcataccttggaaatattgcagattcagttctagaccactacaatgaagtaaatattgcaaaaaaattattcacaagaatttttgtttcccaatgcatacagaaattatttacactgtactgtaggctagtaagtgttcaataacagcattatgtccaaaaatgtaacttaattaaaaaatacctattgcttaaaaatgctgacaattatctaaacctgcatcatattgaaatctttttgtggagggtcttgccttgagtgatcagggaggcagttgccaaagattgggttggctgtggtaattttttaaaataagacaacaatgaagtttgctgcatcaattgacccttcttttcacaaaagatttctctgtagcatgcagtgccatttgatgacactttacccagagcagagcttctttcaaaattgaagccaatcctctcaaaccctgctgtgatgccttctcaactaggtttatgtaatattttaaatcctgtgttgtcatttcaacaatgctcacagtatctttacctggagtagattccatctcaagaaaccaccttctttgctcattcacaagaaacaactcctcatcggtttaagttttatcatgaaattgcagcaattcagccccatgttcaggctccttttcaaattctagttctcttactctttctaccacctctgcagtgacttcctccactgaagtcttgaacctctcagcgtcatccatgggagtctcccaaactcctatgaacgttgatatttttacctcttcccataaatcatgaatgttctttcttaatagcatctagaatggtgaacatcagaagcttttcagtttactttgcccagatccatcagaggacattctcttttaggaaagctagacatagagctaaaaatccaaaagttggaagaattaactaaccttattcaagactccttaataaagactcctgactgtggaacagactttataagtgattcagttgcatgtccagtccttgggtttgacattactcccagagaaaagtcataatgactgtactttcatttgttttatgtggcagggagggtctaagaggctaaagatatctgatactactcagttgatactcgttattatggtcatctgttactatgcaataaaccatccccaaatttaggggcttataacaacaccttatcattttctgtcataattctgtgggtcatgtgggcttaggttggtggttctcccttgggtttctcctgcttttgtcagcagatgacatctggggctgactggttcccttgggtgggttatcccggacggcttactcacatgctggcagtggatgctggctgaacgctgggagctccgctgggcctcactgaccatagtatccctgtggcctctctctgtgacttgggcttctcatagcacgatggctaagtcccccagatggaacatctaagagccagtgtctcaagaggcaggaagcagaagctgctaaattagttaagagctaggcctggaactggtgcagtatcacttcctctatgttttattcatcgaagcagtctcagggcccatccaagttcaagagggtgagtgagtgacaaggtcacgttgcataagagcacagaggagggcagatgatacggcagctgtctttggaaaatatagtcagccgtgatgcctactatattttttcacatgtttttgcaaataataaatctaaacaagatttaagaaaaatatatttatagaactgtgtttcaaatggtcaagaaaatactcctaagatacaaaaaagatgactattcagtaaaaccagttcctttaagttaaatttcatagatggtaattaaaatatgtaaggcattactgatacgataatccagtaaaacaaactgcagaaataatggaataaattaacaagaaaacaatgttaataataattactaccatcgttgtaccaacagtggaccaggcagcttacattatggccttatctaacctgtatacagcctgatgaaatgggtattattattattattattattatttttgagatggagtcttgctctgtcacccaggctggagtgcagtggcgcgatctcggctcactgcaagctctgcctctgaaatgggtattattacaccaatttttcagatgagaggactgaagcttagagaggtaacatattttgcacatgatcccacagcgggcaaccgattgcactaagattcaatcccagagctacctgattcaagtcaagacttttgtacgttacagtactgccctttcaattcacaggaatatggtgaaaacatagatatgcaaaaatacttttttaaaaaggagaaagaatagaacgaatgaaagtcaaagatgtgatgtttcctaaacacacacagtcatctgaaattagcatctgtatggcttcatgtattattcttaaaggtgctttcccaccatctacatccatatggtaattattcctccaggcagaaaaatatttgcctctagtgactcccatgttattccaaaatatacttgagatttgggttaagtcttaacagaaataaccacatgatttagtatccacgtaggaaagtacctaaggacagaatcatccacctagatggcacaaggctcctgtttcacctgttatgtgtgtgattcttaggttgcctcagtaatacttggctttggttctggtcaactagtcggctataattaccttagtgccactgtatgaatctactatctatgtgtggctagagtctctaatttaaatacatcaacacagcaggcaaggggaaaccaagcatagttcaataggggaggcctgcctggaggctgtagaaaatagaaaaggctttcagtcagtgaaagcaggtgcccaggcattaggctggatttagattcagaaggacatgtggctcccaggataggagacaagtagtggagaatatcaaaattgtatgtggttataggtgtgtctgtgcatatctgcacactcagaaagtgatcatgtattcatacaattctcttaaggtggttagtaagtctccaccacttgtttggggtatgccccttgccttcaagtggtttacatctgtattggcagtttagacataaattaaattaaatgaaatgaaattaataaattaaatgaaaatttaatagtgacatgagaagttttgaaatcttggttactgactgtaggtcatggaaacctagtcctggaagaactatgttaagaattcaagagacaggtagatccattatcttgctgtgtgatttcagacaagtcaaatcatatctctgcatctagttcctcgtttataagtaaagacagatgctggattagattattttaagatgtattccatttcctcaaatccttttcttcctgcctaagccttacaattacccacttgttgttgttgttgttgtttggattttgtttttttaatcgtctgcctctagaatatcccttcatcagaattgttagctccagaagaggaaggtggctgtttctttccctcaccctcctcctgtgcctggagagatacttcacaaaataaaacagtctatctagaaattctgaatccagatactaccagttgaaagataccactgttttattatgactaagaaagaaaaagtagtttccattcactggaaaaaaccgtcagttgaagaacacactgcaatatcagaaatattaaatcaaaaaaagtacatcttagaatcagtgaaatcatttttcatttactcctgttctttcattctcctttgtacttttaaacatgctttaaaaaaatctatctcattcttatgggtctactcatttcctttctgaatttctcagaaattattttagtgggtttttttgttttgtttttacagtaacgttccctcatgccctgtggtgtgaccatgtggatttatattgtcctcatcctgatgtctgtgggtttctcctgatcctggctagattttaggcaaattctttatctgggaattactgcaaatagtgattgtgtgaatccaaatctcacctcagcatgttgcacattttccagcaggtacttcttttttttccccacgaacatcctgggtggattctggcattcttgtcactttcctggaccaatgaacacagtgtgtgtacttcctttcacagactagaccacgctccagggacaccagctttatttggcacccacttccacttctcctcctacctgagcctgacaaatgagccctgagcctttgaaacctatgctaggtttgacaaatagtttgcaggagtagcacaatccttctgaggcctttcttttttctaccactccaagctataagtcattatgcccataaaattcaagtggacattttagtctctttcaaaattatccgatgtatttgttttcttgcatcttcttatttgctcttgatgtcatgaaagatcaaaacacctttttatgagttatagatattcctgcagtgtttgaggctttcatttttagaattagtatactagaatagaagtagccatccacttaaaaaaaatttattaagcatcaagcatttcaaaccacattttaggagcaggagaaataatacataacaagatgtgctccttgacgttgaataggtaagagtttagtgagagttttacttgaaaaaatactgcatatatcaatgtccccattttcttttagcatcctttttctctaaaagtgcttatgttctacccaagattgtgaacaaggtctgactacttggcagtggtttggtgtcatggattttccatttgtctttcacacagctgaccaagaggaggaagctcaccccgaattcaaatttggaaatgaactttctgctgatgacttgggtcacaaggaagctgttgcaaatagcgtcaagaaggtcagagtcccctttctttcatcactctcaagaggtagcagctgttatttatgaaattttggaaatgtgagaaccacaagagaataaagtaacctataattccccttctaaattgcttaggatacgagtctgtgctgggtgaccagaacttgacacatacacaatattaaatttaaaaggacatttaaattactcattagtcagggccagtgttaaccactacccatttggccagtgtcctctaaatattatcatttattgtgttattgcagctggggagggagaaaatgacagcatcccaggggtaagatttaatcttgaattcatcaggaaaatgacccctgaacatcccgagtctagccctcatttgagaactagtcctgctaattatataccttccccctaaagtacagtaagcataaaaatgtttccagatattcagccaaggaaaatagttattcatatacttaccttttgtcaggcatagtctaggccataatgacctaaaagtgtaaaacacacttgccttctgcccttaggcagctcatggccccctgtagtttagggaaagggatcggaaacagcaaacaagcaagtagtcaaataactatataattacaacttacggtgagtgcaattatgaacataaacacgcatgctgaagaataatgaagtagaaagaataaggaaaccagaacgcaaagggtcaagaggaattggccatgcacagaggttgatgaatcactttccatgcggagggaccacagtaacaacagcaagggctgtgagtagagtggcttgagtgagggtggagtgagacgagatgaggcaggtaggtgggaactgggtgatgtaggattttggaggccattatgagaaattcaaatattcagtgaaatgtgacactactgaaaaagtttagagaagggggcagtgtagcctgattcaagttttaaaagattgctgtggttgccatatggagactagtttaggaggaaacaggagtggaagcaggaaaagcagtgaggacaggctgctgctctaggccagacgagagtccccgatggtcaaaccagacaatgcatcagagaggactgagtggcttcaagacatattgagaaatgggacagcctactgatggatggaatgtgggaatgagagagaaagaagaagtgagatgaccctctagtgtccttgtttgaggaactgggtaggtgatggtaccatttactggcatggggaagaccgaaagagaaagaattcaggagtttcaaatgggatgactatttgagatgcctgtgaagtattcaaggggaggtgttcatatagcattgccatctgactctttctctgggttcatttcctaactgtctaactttgggtaagttacttaacctctgtgtaccttagtttcctcatctgcaaagtgaagacgataacacctatttcatggggtcactgtgaagagtggatggtttgtgacatgtcaagagcttagcgtggtgcctggtacatggtaactcctgtaaaggtattagttgctggtatattatcatccttttcatctttatcattgtcattatcctcatgatcactggcgtcattatcacgcgtatatagaagacaggttgagctagagatacaagttgggagttcaaaagatcgtatttgaaacaatggaaatactgagatgattcacaaggaaaggtggaaaagaaggcccaagtggagccctagttaaaagtggagccagaaaagaagagcaaggtatggctagagaagtaggagggaaattaggcagtgacaccaagaaaaccaggaaagagaacagtgttaacagaaggactgagtggttgactgtagaatatgttaaaaatcttagacaaattaaatttaacagagtttagttgagcaaaaaaaacaattcccaaattgggcaggacccaaaccagaagaggttcagagaaactccagtgcagccatgtggtggaagattttttggcagaaaaaggaaagtgacctacagaaaacagaagtgaggtacagaagcagctgtattggttacaggcttatttgccttatttgaacagaggttgaatagttggccacctttgattggctgaaactcagtgattggcacatgagtaggttccagtctgtttacacacccattcagtctacagtttactatgtgaaagtttatgaaaaaacctttagaataggtaaagagacacctttaggctaaacttaatttaacaaatgctactgactgattaagtaagaagactcaagagtgtcctttgggttgttagcatggaggtcgttggcaaccttaaagagacatttcagtggagtgccaggcagggtggtgacactggatcacacagatatgaatgactagagactatgcttttgagaagttttgatgtgaaggggagcaagaaatggactggtggccaagggcacctgaggagtcaagggagtgttttctttttcggatgaatgaatctggagtgtgtttgaaaacttggaagtggtgcagtagagaggaagagattagttttgcaggaaagagaggggataactgcctggaattccttgaggaggtggaagagggtgggattgctgtggtgcaaaggtgtggcccttcacaggagcaggaacacctgattagtgaagacagtggatgaagatgcaggtaggcagatacatttggtgataggaagaggggagagtatttgtctgatgagcaaagccaaaggaatattgcctttacacactatcttttctgatatagggaattgtgactactctgagaatattgaacatctattaagactcaagagtattgttttaatacaaaaattagccaggcgccatggtacgcgcctgtaatcccagctactcaggaagctgaggcaggagaactgcttgaacccaaaaggcggaggttgcagtgagccaagattgtgccactgcactccagcctgggcaacagagcaagactgtgtctcaaaaaaaaaaaaaaaaaaaaagttgctaaagccttcatcaatattgtcttagtgtcttagtcagttggtgctgctatcacaaaaataccattggcttaaacaactgaaaactatttgtcaccattctagagtctaagaagtctaagatcaaggttccacgcaatcagttcctaatgtggggggccttcttcgtgtttatgtcctcatgtggtggacagagaataaggaggcaagctctctcttggcttggccctcatgaccaaattacctcccaaaggccccatcttcaaatgccatcacatgagaattaaggtttcagtatatgaattggggacagtatggggggctgcaccagcaaacagtccataacaaatacccagacatgaatgctgagttactcaagagtgaccattcatgctgcttttcctaagccccatgactaaagcactaattaaataattataataaaacatctaagtaggtaaagactgtccacgaaggagggaaagagcattaagattagcccttctggtgcataaaacagtgaggccatccatggctttttgtcatcagtaatgtcccaccttagcaaataaatagaataacaagtttacctacacttatttaaatatctatgtatgtatggctaataaatttggaattttgccctttagagaagtaaacaaattatttcctttctctaattaggcttcagatgaccttgaacatgaaaacaacaaaaaggtaacaaaataattcccttgcacattttaaatcagatgcatctaatttaaaaaatcttcaaaggaaggaatcagttgtggtgaaaaaatgattaaatcctgataaaaatcacaaaactagggcagatgagtaagatgattttctaaaagtaggtatttaatgcagtaaggcattttcttcactggaattagagatttcattcctgcagtggaactacatgatcatcagcatattgaatttgaaaataaaaatgagtgaataggtcatcaaatccatattatagcataatagaaaggatgatcttagttcccactacattgacattctggaagatcactgattaattttacactgcataacttctaagagtattatttgatgttattagctattggccttattgtaggaaaggtaaagttacattttcactttctttcatcctcttcaaagttcttcaagtgatcacagtggttttatttagtaagtatttatggtttatcctacaacagtgaggctgacagccacaggcagaagtttgcctaataacttcattctcatacttcagaggttcggaaaatactgccttgctgcctgtggggtcctatcctatttgaagttgagatcgtatcttctcaccctctaaatattaaacttgaaagaattatgaataaatatggtcgcaggcctgtcccaaaatatttgtgagtacattactctcttgttctagaatttcataattcataatttgggtcaacagtatacagattgacatttggtcattgtcatttattagctaagttattttaattctcaaggcatcaatcttctcatgtggtcagtgggtaggactctaatcctcactacacatcacagacagtaatgagactgtgtgtgcaagaactcatcctggtgctcagctcatagcactggtggtatttattattattaaacacacatggaaggaacggacatggccgttgtttggtgggggagcaggaggacacattaagaaaatgataaaaacaaaaacaaaaccaaattacattacttgattattgtttcaggcttttattggtgaaatcagtttgataatttagaatgctcagattgttaagtgatcagttaagacaaacaaattgaccatttttttttttttttgagatggagtctcactctgttgcccaggctggagtgcagtggcgtgatctccgctcactgaaagctctgccccccgggttcacttcattcgccattctcctgcctcagcctcccagtagctgggactacaggtgcctgccaccatgcccagttaatttttttgtatttttaatagagatggggtttcacagtgttcaccaggatggtctcgatctcctgacctcatgatccacccgcctcagcctcccaaagtgctgggattacaggcgtgagccactgcgcccagcatctgaccattttttaactcatggattacatcatccaactaaggaatttatccaactagattcactttatgcaggaaatttagctttgcaaagttctcagcaaaaatattgatcacttttgaaggtatttttgttgttggttttattgttgttttttctatcaataaataaactaatttgttttcttttttctgtatgcaaagtaatgcagtttcaatatgtcctatgcagcaagttattaggttacttttaagattaagtgctttttaaatactataaaccacgtatgtatgttgcttacattctagagtgctacagtgaaacatagtccccaaagaggcagcatcattagcacctgggaactagttacagcaatgactggcctcactgcagactcacttcaacagaaactctgagtgtggggcccaggaatctgttctagtttaaaaagtcttccaggtgattctgatgcacgctaatgttcgagagtcactatttttgatgttgtgcctcaatttgtaaaaatatgatgctatatctatttcatagcattgctgtgaggtccaatatagtaatttctttttttttttttttgagatggagtcttgctctgttgcctggtctggagtgcagtggcacaatctcagctcacctcaacctctgcctcctgggttcaagcgattctcctgcctcagcctcccaagtagctggaattacaggctcacgccaccacacccagctaatttttggcatttttagtagagatggggttttgccatgttcgccaagtttgtcttgaactcctggcctcccaaagtgctggattaaaggcatgagccaccgttcccggccagtaatttcttgaataaagtcccttaaaaatctaaaaatgtcctacaaatgtaagataagcttaatattttatgattacctccttttgcattattcagagctacaacagacactaacttcttaaagtatcctttagcataattgaggaagaaaaagcctttacctttcaatttgtgtgtgtgcaattatctttattaaggaaatctgcagcacgtatccgtgggtcctactgaagtcatcaacttatatgttttcttccttgtgcttgtagggcctggtcactgtagaagatgagcaggcgtggatggcatcttataaatatgtaggtgctaccactaatatccatccatatttgtccacaatgatcaactacgcccagcctgtaaagtttcaaggtttccatgtggcagaaggtaacaccaaaggttaaatgcagtcgccttttttgcttgattttcttttatggtgctgatgagcttttatctaatttgttgccatttttctttgtgggcatgggggctgttccacctcaccttatttttgtttcacagaccatagaagccaccttggtatgtggtgacattacattgtcattcacgacttcaaccacaaggtggcgatgagagactatggatttgttagtgctgggcatgtagcttcttctgttcccaagtgcattcacaagactccttttaatcaaaagctggttttcaaaaaaacataagaagtatttaaaaacttcatttctgggctagagaagccatcgtaatcatcattatcatcaaaaattcatatttcggtggtggctgaaaagacagatgtctccatccacaggatgtcaatgaaagtaggagctactgacatgataatgtagcattagcctccaaggcctcatgattcagggtgtaattgcatttatttattgctgtttttcggtgagggtttgatggcagagttcctgaatccatctttgcttttcttttacagaacgcaatattcattataacatgtcttcttttaatgaatcagtcggtcttggctacttgaagacacatgcaattgaatttgtcaagtatccttatgtatcaagtggaatgagtggttgactcacgttggtttggcaagagcctctgaaatagataaatggctaatatctcattctggtggtggagttcataaaatgatatgtgggaaagaccatggcagctgtgacaatctgcccaaatgaaaattgtttttataatccacacagtgaactgtgatcttaagcatcatttgtaaatgtgaaatctgctctgtgctgtctacttgtttgtcattgttggcctagacctttgttgttttagctctttgttgtttatttttctctgctgtaggactctttttttctgttttccttaataagttacagttataacaaacggcaaatgagtcgcatttaccccaagggaggccgagtcgattccagtaattacatgcctcagattttctggaacgctggctgccagatggtttcactgaactatcaaaccccaggtaggagctgatgtccagtgaccccaaattccatgagaacactttgacaggatggtgccagcacttcccatcagttggctgtgggcattttttaaaggaagcagacatatggcaaagcaatgtgttattggatttatataatggtgagaaataaaaaaaaaaaaaccaaaatagagcaaacaatggtagaagataatgtgttgtgattggaatttaattcctttcataaatgccatgactattcctgctaaccattatcccatattccaaaatatttctcatttttcttccttttggatcaaagttgttatctttgtttccagaggcagaattaagtgaaaagaatttgagtatctttgtacagtaacagcgactcatttctcctttggcaaacaccctgaccactgtgaacattcagcaaatatgactgatgcaggggcacttcactaaacaaatacagaatattttgaagtaaatgccactaaaatggtatataaggagttacatatttgaagaggtactaatctataacttggtcctccaaagtgtactcaaagtcaggtttccaatatataatgactttttttttctggaaggaaaagagtaaatttttataattgataaacacatttttaaaatttttgaggtttgcttaagagcctaggatcacagtatcaagactagaggtagcaaaatagaaatagaatagatagaaatatgccacaaaccctcttcactgtagatggtcaattctacagcatggttcttacaactggtaaaataaaacaaaaccagaaagctcttttttccttcaactctttgctattaagagaactgcccatgcttcccaatttgaggattttttaaaatctattttgtattttaagaatccctgtcacttcgttccctgctatgtggattgagtggaagatcctttgactttcattcctttggcatgagtgtgagctgactgtgcttctcatgccttgaaggagcctccccagtgaccagaagctcctcctactggagtcaccattctgcatggggtccccacagtgcttgctaggttagactgtgacgtgatagctaccaatacaatcctgagtgtttctagctggggcccagtaacaaggctctgatgacttcacttacttaaaaaagcccaacttgtgttctcagttgtcagtgagtccataatatggattaaatggctaacccagcttatgttttattctataatattaggtttaaacacaacattttgaagaggaaaaaatatccatcagtttacccatttcttttgcggatgggaagaaagaaaaaatgttattcacttgcaagacagaagtcaaaagccatgtgctgccagtgtagaccccactagagtaattccccctgcctcccatcctggaagcatgccaccaagttttatgcgatacttacctagttcattttccagtcttttaaatcaagtttcatattcaccctcccgggtatctccagggttcctctgcccagggatcctgagacccatcctctcccactgtagcaggttggatatctctactctcaatactcatcaaacaatggtgtgactcctatattgaatccagttttaaaagtgacctttagcatgatctttatgaaaacacattttatgtttaatttaaatgaaacatgaggtcaattcaacatggaagagagtatgccttaaatagaccaagcagaaccttgtagtattaaagagggacctgtgggcctaggagcaatctgatacctattgtttcaaatcaccccgtcagggtcttttttgtctaggaagacaagatgctaaattatttttgtctcttgacagatttagcgatgcaattgaatcagggaaaatttgagtataatggatcgtgcgggtgagtaatatgatttaaactgttttcacctagattgagaactccatactacagctctaatgaagccatgtcattttcaattaggggctacagaatttaagctgggtttgagggatggaatagaaagaaatgaaatacctagagaatatttgcacatatacattcttcatctaccccattttactaagcaggttttgggttttttaaatcacaagtgaagcagttcatacatatgctacagtttaatcctctcactttaaaatcaatagtggaggattttatgtctgggacaggtaataatccctgcacacttggacattaactggagatgtaggcattaaatatgtgcattttacctaggacaaatcaaataatgaagttaatttcatatgtaatgaagttgtgggtgtcgagctgaatttcattcagttgggaataaacctttgtcctctactgattcttttttgtgtcttgtaagtagcagttatcaaagaataatgctgtgaatattgtcctagtttccttaaatagcactcttgaaaactgtgaaccaagaagtgaaataggaaatgttaattctacagaaacactgaaaggttaaatgaaaatataaaattagaattctcttgagataaaaaaaaaaaaacacaactatgtggtcatcccctcaccccacctcagcctcatgcatctgtccccaaacaagtaaatattaataactccagaccactgcccaaaggcctgtagaggaatccaatggaaaactatcccgtcataatgatgctattaggaatttcttcatggtggctcacctgattggatatctttttatcactgaacactgccagtcaagataacatttttcagtggttgtgagttaggaatgacttttcagcatgcactctgcctccctctgccagcctggtgaatggttctctgccaatgtggctgcaaacacagtgattatgctattccccaaatcacccaccacttacatacctggagcatgccctacattttcctctgctgtgtgctttggaagaaaataaattgtgtagctgggaagagaaagatctgaattcatatttcagaattttgtgaaagcaattttgttatttaatgccaagtgttccaacccaggagattttgcgcataaattgctttgtagacctcctcctctcccaagtagtgggccaaggcatcaagccccaggggttcagccctggactgtcagtaaaagccctaggctgggagtctaaagatcagggtttgagctcagctcccagctgctcctagttcttgctgtattgcctagagcaggtgtgttagacccagagcctctcttctctgcttgataaaatgaagacggtgacacctgtcgcacagggtttgttgtactcaaaggaaaaaaaatgtcttttttctagaacgaaacagggaactgaaaaagactttgtcctttgacaaaaaccgagtcctttctgatgagacccacctttgggcttccctctcagtcactgtagaatccagtctgagcaacaatcgtgctagttcagtttagtgaaaatccccagcccttggtatctgaccaccctggatatcctgtcactttggcctgccttcagcaataatcctatcaagtcagtttggccagaagtccttatccttgatgtttcctcatagtaattttccatctgctggcgctcaccttactccatggttctaaatctccatgtacgcttgttggggtaagggttgagcccttatacctatcaccatggctccctacccctttgaataaagtccactttaccatgtttaacaagtgtttgtgtacatttttttctttaacagtttacgacagctcagtcaggttgaatgagtgtacgaaagtacttcaggaactgcacatttctgtgcaaaagtgagatttaagaaaagcttaaggccttgtgatcaatcacacacacagacattgcaaaattcaatgagtgctctgttcagtcgtcctttaaggaccccaaggagtcagcctcagcactcctggctcttacaggacccgtcgggcatggctgtgctcacttctgaaaacttgcagtggcccggtgatgcttgaagcactttccttgcccacctcagcgatcacacctaagatgccatcagctgtctaacatgccatgaggaatcctggcagcctggccggatgcagggagtattgtttctgtataaaaaaaatcctgacggctcggcccagtggctcacacctggaatcccagcactttgggaggccgaggcgggcagtggctcacacctggaatcccagcactttgggaggccgaggcgggcagatcacaaggttaggagatcgagaccatcctggctaacacggcgaaatcccgtctctactaaaaatacaaaaaattagccgggcgtggtggcgggcacctgtagtcccagctacttgggaggctgaggcaggagaatgtcgtgaacctgggaggcagagcttacagtgagccaagatcgtgccactgcactccagcctgggtgacagagcaagactccatctcaaaaaaaaaaaaaaaaaaagtcctgacaatcctatgttgtttgtttttcctagaatttctgcttagccattattagcacgtgcagtgtctcactctctccaccgttatttattttttcttaagacagggtttcgctctgtcacccaggctcaagtgcagtggtgcaaacgtggctcattgaggccttgacatcctgggctcaatccatcctccctcctccacccctcaaatagctaggggtgcccaccaccacacatggctagtttttttatttgtacagatggggtttcaccatgttgcccagactggtctcgaactcttgagctcaggcaatctgcctgccttggcctcccaaagtgctgggattacaggcatgagctactatgcctgacctcactggtcatttgtaaatgcgttcatttattttaaaataccttcacagaaaaggatactgttgctactttagcctgaattctgtgctgatgtgttggacgctatgtgactgaaagcatacacctcaccagaaaagctgaaaaatagcctgtgcagtggggcagcccagcttgataaagtatcagcgatgctgttgactctgtaatctcctaattccccttcccatacacccagctggtggcaaaggctgtcagtgacagggaaaagagaagaaattgccgtcacctgcatgcctctgtgttccatggcgatggtagatgtggggcccggtgctgcacaggagctcctgtcactggtgctcgggcactgcatggttctcaccgtgtcacccttgtggttctcccacccacctgcaaagacttttaaaaactgcccctttgggctgagtctgaggactgcatttcttaaagaggcattctgtgccctttaggcctgtggaggcaaagaatccctgttttatatagaacatcagtgtgcaaagtacacaaacacccccaggatctagcaactgtagcaaaacgtcagataccctcctgggaaaaccctctgtgctccctggctgatcttgtgggaggacgcaccactgggcccaataagtgtgaatgttaccaggaaagtgagcagtgcttttaacagtctcgtttttgaagatggaaaaatggaagacatttccctaattgcaaatgaaacaaaatagtgtaaattaatacctaaaatctttttagactttcataggaaagtgagtgattgatatcaaaatggtatgacattttatgattcagaggctgttttttatacagcatttctcccttgcccacaggccgtacgttctaagaaccccagtggatgcctgaaaccaccaaacccaacatgtattatatatattgtggttctacacattgcatacctgtgataaagtttaatttataaattaggcatagtaagagattaacatcaatgactaataatggaacagttataacaatatagtgtaataaaagttaggtgaatgtggtctcaaaatatcttaattttttctcttttatgtttattggctatttggatattctgttttgtgaagaacttctactcattttcctattgggttttctatcttttaaaatagattttttatttcaaatttttattttccaatttttatattaggttctattttaatatttttggaacagagttgaccaggggtagctgaagcctcagaaagcaaaattgcaaataaagggggatactgtatagcatagcaacttgcagttatcatcagcagccattttgctttcttgcagctaaataaaataatggcatgttggacaactgatggcatcttaggtatgatgaaataggatgcatttccttatgaccccattttctcattcttggtgctcctatccacccacctggttagcaacccttcttctctccctcgcttgccttccaaggccttacacagtccacagaaaatccttggatccctgtcttggcattggctttggccttgtgcctgtgcctaccgcacagacctagatgtctggaatgagttcattttctgtaccagaaagcaccaaacagaccatctatgtcatttgcagggcccaatgcagaatgaaaatgaagggctcctgagaatttaggatggtggatgcagagcattaaaccaagcatggggcccttctgagttcagggccctgtagaactgcacaattagcacatccacatagccagctctggtgccagattctggcttcagcttccctatcaatgccccagccccctgcaccctcacagccaccagggatatgagaggcaacctctgctgctctctcagaccgccttggacccagaacagatgctcctttgaccttcaaagaaagcttgctaagtgtcctatcccaggccagggcttatctcatggtcctgacaagcttctgcatactctgttttactctcttcaagtatacaaaatgaacccatttcaccggagcatgcctgctttggagaattggatatgggtttcttgcccctttcccctgccatttctcattttggatcaattcactccttcagagatgagtgttctatgcagatttgaaaggggggatgtggaagaatgcttttgaccctgagatgtcattgtgatcccgtttcttattttggtgggtaggaagggctcttgatctttaacaaaggactgtggaaagtgaggaatctctggacactcacttcccaaggagattcagaactggaaaggtgactccagtcctgtattcatccaagtcccgaccttcctcgggaggcagaatccctcatttgccacagctggggtccaaatgctgcctgtgtcatgaaagccagacccaccattgttacctcccctcacagtctgtgtcggttttccttccagagaaagctggtgggcttccctcggagatgcaggcgtagtattgtagctactcacctactttccatcctgattctttaccttttgctgtatcatcatattttctagttgccaactctagccacaaaaaaagctgcaaatctaaaattccatgaatacagaagataatctcttctatatagagagcttttatattaatattgtgggttgcattctcttggagacaagagtgttcaaaattaccttcaacatttcaacaattgtgtaaatgtctatattcttgataaaaaatcagtgttgtctcttaaagattcctttttggactatcaaatgtaagggaatatttttaacactttgttttttgttcagtcttagaagataacaatgaatggtgactttttcaaaactaagaaaagtgacattaaactttaaagaaaaaatatcatgactcaggatcccttttgggttgtattttaacagataataaagttgacatcatctagacttgaaattaataaaagttatgcttctaagaaaaattagagatttgagttcccataattttgattcttttacatttaaaagcaaacctttacttttggaaaaaagtacttttattttcattgatgtactgctcatagtatggattctttaaatctatggttatacttatttctaataattttttaattttttttaagttttttgacacaagtttcagggaaattatggaatctgtgattatatgaccactaccccgtggacatgaggggcagacattgtgtagtgagggtaattgcagaacattttcatcgcctcaaaatctgtatcgtttagctttcatctcccaataggaattttaatctaccctctgtctctatatttgcctattctgaacatttgatataaatgaatttatataacatatggcctttcgtgcctggcttctttcacttaacataatgttttcaaggttcatccaggttgtaatgtgtatcaatactttattatttttattgctgaataattttccattgtatggatataccatgttttgtgccatacattcattcatcgatggacatttgggtaatttccatctctggattattacaaataatgctgctatgaatgttcatatgcaagttcttctatgaatatgtctttccatttatcttggttacatgcataagaatggaattgctgggtcatatggtaactctatgtttaactctttgaggaactgccagactgtctttctaagtgaatgcatcattttacactcctactagcaacatatgagagttccaatttctccacatccttgtcaacacttattgttatctgactcattaattacagtcatcctagtgtatacatagtgatatctcattgtggttttgatattcatttctctgatgactaatgatgttagacatctttttatgtgcttcttggttttttgtatatcttatttggagaaatgtctgttcagatcatttgaccattatttagatgagttattctttatgtattctagatacaggcctctaatcagatatatgaattgcaaattttttcctttttgtgactagtctttttactttcttcatagtgtcttttgaagcataaaagttttcaacagaaaatccagtgtatcattgcatgtgcttttggtatcatgtttagaatccattgccaaattcaggtcataaagatttgtccttatggcttcttttaggaattttgtagtttggctcttgcatttagttattttatcctctttgagctaatttttgtatatggtataaggtaaagatccagttttatttatttatctatttatttgcatggaactatcctattatcctgtcactatttatttaaaagactattctttcacccattgattggtcttggcatccttgtcaaaaatcaattggccatagataacgtggatttatttatagactttgattctgtctcaatgagttatgtgtttttctttatgtcagtaccagactgtcttgattaaatcttgtagcttagtaataagttttgaaatcaagaagtgtgagacacccaattttgttctctcttttaacattgttttggctattcttgatcccttgagtttctatatgaattttaggattagcttgtcagtttctaccaaaaagtcagctgggattttgatagagattacactgaattcacacatcaatttgagaaatacttccagcttaacaatatggtcttccaacccatgaaggcaagatgtcttcccatttatttagctcttctttaatttttttaaacagtgttttgtagttttcaaattgtagacacttattttttttaaaaaagtttattcctaagtggtttatattttgctgttgttatagaattgttttcttaatttcatttttgcatgttcattgtcattgtatagaaatacaattgactttttatatgtttatctggtatcctgcaatagtggtgaatttatttattccaatagtttttttagtggattccttagagtttttttttatttatgggatcatgtcatctgtgactagaaataggcttacttccttctttccaatctggatgccttttaatttgttttcttgcctgattgtttctactagaaatggagaaataatttatttttattttcacctacctctagctgaaatgtcaattacctttgattgtgaatgtagacaacaatccacagtcacattagtggtacccgtgactctctcaccaatgtaaatcacagacattgtcatatttcactactattgttacagctgtctcaaaatatttttgtactttagattattgtcatcataattagatcttaccattagatcttataatttaatgcattattacaagtacaattaatacagaggtagaatatcacatatttttatattttgataactatagctaatataattggtttttcattgttattctttgcattttattttatacatataaagaaaagtatttaaaggtgaccaggggataaaaaagttccagagaagatgataggatcaggaagtcctggataccactgaggctgcagctctttaaggttgtgcataagggcgggcacattctcttccatccttaggaccctctgcctaaaatcctagctcctgtgttacagatggagaaaaggaagcatccattgtttcaactagcgagtgttttagtctttgtaaaacctactaataaacttctatgctattgtcctaccaggtaccttctcaaaccagatttcatgaggcggcctgatcgaacatttgaccccttctctgaaactcctgttgatggtgttattgcagccacttgctcagtgcaggtaaggcccctgctcatcacaaggtagtataaatgtatacacaagtggtccttgaaagaaattataaaatattgaatgttaaattgcaagatccatgtgctgctcacaactttgacttaagattccaccccctttttaaaaaatgagacccattttttcactagtaaaattattagctacttaaagtgaaagataccatcaaaaaagtacctgctacttgattccatttatacaaaattctagaaaatgcaaattatagtgacagacagtaaatcagtgatggcctttgaaaaaagggcagggaggaatgggttacaaaagggcacaaagaaacttcaggtgatgatacaaatgtttatcatcttaattatggaggtggtttcgcagatgtgctcatatgtcccaactgatctaattttacattttttttttgttttttattttttgacactgagtatcactctgtcgcccaggcaggagtgcagtggcacaatctcggctcactgcaacctcctcctcccggtttcaagtgattctcctgcacctgtagctgggattacaggtgcccaccgccacacctggctaatttttatatttttagtagagatgggtttttaccatgttggccaggctgttctcaaactcctaacctcaggtgatctacctgcctcagcctcccaaagtactggcattacagggatgagccaccgtgcctagcctaattgtacattttaaatgcatataatttattgtatgtcaaatatacctcaaaaaagctgtttcagattgttagctagaaaataatgtaaacaaaaaaccctaataagtggctatagtcatttaaacactaaatgaaaaatcatctctccatagctttatcgtagatagactaacattataaaactgtcctagctgaccagtgtcaatatcagtaatgacagacaaattctagcttcacttttctgtgtgtctcttttcaagacttctaaaagaattcattaataagtatggcatgatggaatttcagagctatgaagggtcttaggacatacctgaattcatcacttcatttcataggtgtagacacttaggtgagatgaagaggccgtggacactatttgtattatgattcatatatattttttctttgttttttttctagacagttctagaaggtagaacatctgcttgaaacagctggggtttttttgcctatagtagttgttcgataatgttttggtttgatagaaatgaatacattattgccatagataattgaaattcctgctcccacccaaaagacagaatttcttacttcctgattattttttgctactgatgcttacacagagcttacttctctttgctctcgttcgtgctgctacaggttatatcaggtcaattcttatcagataagaaaattggcacctacgtagaggtggatatgtatgggttgcccactgacaccatacgtaaggaattccgaactcgcatggttatgaataatggactcaatccagtttacaatgaagagtcatttgtatttcggaaggtaggacattttcagcacgtcaaacttactctaataacttgggagccatgttttagttcacagacgctacacgatacaggggcacttattcaaccgacaacatcttctttttctcttctcctaatggctaacttctgtagctgtcataggatcattggttctatttggccctgcctccttttggttctcctctcctccttggaagagcccatctcctgcacagcagtgcctcagctctgggtttaccatcttttagaatgagtccttgctggtggacaccatcgtacactagagagttcttccctaccctggaagttactggtaacttacactattcctttagccaagtagtcaggtaagatgctgcactccaaaattttggtcaatagatgtcactacatgggtcagttggcatggtcctgtctctcctgaaagagtgacacctgttgcctacttgcaggtcttatccttcttgtactgttgttagtgttttatttttttctcctaataccgtatgttggatcctaaaaacaatcacagccattctctctaacgttcggttgttaatctcttattcaccttttcccttggtttattttttgtctattgaagatgcagtggaaaatccgcacaccggcagtgctgtctccaagaatgttcactttcctttcttacttactctgttgtcctgaccacaatgatttcttgctgcttctttaggcacaagttttccagctggttctgctccatttgtacatcatgcaacacagataatcagcttctttccttaacaaaatagggattatccatttcagaatagagtaactggcttacagaaaccaaatgaagggagatcaatgtaggtttgatgaaacaggccattttgacatttaagtttacgctgggatccacacaatcttcgcatcccattgtcttcttctctgcccctgtcaggatatggtgtaaattacatgcatagctgtgatttggttttttccttccctggtatttccaatttgttatagctggatccgttaccagtatggctagtgttctttggcatagtgaataatccctactcacatttctagaagctgagaaagttgactcaggcattctttgttttggatgaatgagaaaatacccagcttagtgtttatatataatagttctggcactagaaacgagatgccaattctgagtccttctctgttcttcagaagttaaatcgtttttttcattgctagcaagtgctttaaaaactttgttttctttcttgtcatttttgtatttttcactaatctcacatggcaagaatggcaaatcccaagcctctattcactgcataaggagcaagagagagggaaattggctaagttaccatggtttctcctcttcatcttcattaagctggaattaaattatagccttcagatgtaaataggcaaccagtccattgtctagctttaaacatagcactcagatcaagcaagatgtcctggttgcttttagccaataaaaaggcattcctgattaaacacattggataccctttttgtaatgttgctattttgtaactgaatcaggtttctgctatctgaactcagattttatgttcatttattccgtttggggatagcaggagtaggtgtcttagaatcaaagtatgttaatgtttctagctaccgcatcttactctatttaacatcccaacatttgctggaaactgaggagtacaagaaacaaggaggacccaaatttatgtacaaaagttatctcttatgcatgaagcatttattcagagatacttaatttatttattcagagatactttatttattcagagatactttcgtattcttaaaaacaaacaaatatagatgtcagcaatatgccagatattagatcacaggattagatccccaattcccaggccccactctgtcactgatatgtctaagatcaaggaaagtggctttatttctcatccattatatgggtggggacaaggatcaatcacaagggttgaagtggtaatctttaacattcatttcatctaacatttttcacgagataatttccaggaaacatgttccaattgcttttctcagtgtcttgggcactgtagctcatgcagtacattttggggaatgcagatggatcatggacttactttcaacatcagggaacatttaagaacagcatggatttggtccacactccttagagtcatggttcttgggcgctgcattggaaaaatcagtgaaagtcctgttctgtttgcaggtgatcctgccggacctggctgtcttgagaatagctgtgtatgatgataacaacaagctgattggccagaggatcctcccgcttgatggcctccaagccggatatcgacacatttcccttcgaaatgagggaaataaaccattatcactaccaacaattttctgcaatattgttcttaaaacatatgtgcctgatggatttggaggtaagataaacatttgggtacggaatatgatatagatgaggtcctagattataagattataaaacatcttgtccatgctttaaaaaacaataaaaatactgtctattcctgctaatgctgccaaccctgattaccttgaatacatcaagaatacatcataacctcaggtttcatagtaagaaatgaaagtacaaaacgagatgatctctaaagtcctttcttattttaaaatactataattttatgttgtttatcaatttttacaaacacattttgtgaagggtatatttatattgacaatcagactagggaaaaaaacataaataaggtgaaaccatagatatcttatcaatagtatcgctaaaagatttaaattgaactcagctatcaacatgcctgaattttcttccaaatccacaagaaagttcaatttcataaaaaatcctagtcatcaatccatatgctttaaggtaatcaatgggaggaatccaaagctagattaagtcatagaattttgcttacatgcaaacatgttaactttttatggcctccatctaagccaatacattaaaagaaagcaaagatcctctatattgtcagcctgttgaaccataaggaaatagtacagcaggatgatggcatccgattagccaagggttcaaatccttactctccactgctggcagggtgatcttgggaagaggatgtaacctctcaaacccctcatttcctcccctgcaaagtgaagataataataactacctccctcatagcattattgtgaggtgcttatcattagagtacatgatatagcaaggctcagaaatgtatgagcgcatgggggtgggcggggtgtctgtagacacagatataatttctatacttcactggaacacatcactattttatctggggaatatgggataattttgctgtttgtttttagtagtgcatgcttctgtggagggcagattttctgcaactaaaccacaactttaccagtctaatatcagagtcaaaaattaaaataagccatgaggatttttccatcccaaaattcatagtccaggctccttcctccttctcctttgtctttcataaaaaaaaaaaaggaagcacattagaagctacaacatacagtaatagaggtaacaacccataaaaagcctggaaagggatgctgtgaggctgggtaagaggatcagaaaggggcactggagacaagtggtaggtttaggagcagcagtccgtggcaaacctcagaaacctccctgcaacacagcatggtggtggccatggggcatcagctgatgagttaaatcatactccacatacgtgagcttagaaagcaggaactgtggaatacctcatacattttagaaatagttgtataaacccatatgatggaagatttagaagttttgcctctgcatgggttaacttcccactgaaactctaattcattcttgggaactaagccactcgaatagaaaagggaaagaaatcatttgtttagcttctactttatgccaagagctttatgtaaagagatccaaaagcatgaagttgttcagaatggatgtaagcatagggagatctgtgctgcagaaacatctgtatttacaatgtagcttattacccatgttgtatttaagtatttagccaaattaatctctttaatattagtcctgccagtattctttcctaacatgtcattgtggctgcttactttttatcagaagcgtttgaaatttctatgtaccattgatgagattctgcagtcgatgccttaaccagagttgacattcaaatacaatttattcaaaattctctggtcatttattttatatgtgaagaaaccagggacagacattatgcggtgtcagggacttccctgtagataacagaagaagaatatgagaactgtctttttccaaatctctgatcttctttatagcttcttgacttattcaaaatatacttatattttccctgtttagccaacctcccacattcatatctcagtgtgtttatgtgctgaaccagtgagataggaaatctatagagtctgtgttccctggagtattgatattccctcttcattccacaggaacaagttcaagatgaagctcagcaccatcacactcagcattttctagaaaaaaaaatgttttttttcccctaggaaaaaaaagaaactcatcaatatacatcattagatttatatttagctaaagaaagatagtgtggattttcattacttttttccacaaatatgcatagcaggtttattctataaaaagttaagtagctaaaatatgtatcagagagcaattctgagaacacagaggatcaaatgagggtcactcacaaatctgctgcccagagacagctattgtttacttccagtctctttttttcctgtttgtttatttatttatttgagacggagttttgctcttgtcacccaggctggagtgcagtgacacaatctcggctcactgcaacctccatctcccatgttcaggcgattctcctgtctcagcctcccgatagctagaactacaggcgtgcaccactatgcccagctaattttgtgtttttagtagagacggggtttcaccatgttggccaggctgatcttgaacttctgacctcaggtgatccacttgccttggcctcccaaagtgctgggattacagacgtgagccactgtgcctggccttttctgttttatttttaataaaattaaatcttactatactgctaatttggaattctaatttttttttagaatatgtttccatgtcatgaaatatttttatatttttattagctgtataggattacattttatgtcggccataatttagttatggataaacactgaagttttcttccttggccgctgaggaaacagagttaggaatttgagtgcaactccttctgcttctccttctcatttctatagcataaaaactctcaaaactggccaggcgcggtggctcatgcctgtaatcccagcactttgggaggccgaggcgcgtggatcacatgaggccaagaattcaagaccagcctggccaacatggcaaaacactgtctctactaaaaatgcaaaaattagcctgccatggtagcacacgcctgtaatcccagctactctgcaggctgaggcacaagaattgattgtacctgggaggcagaggttgaagtgagccgagttcatgccaccgcactccagcctggttgacagagcaagactctgtctccaaaaacaacaacaacaacaaaataactcccaaaagacacaaagaaataacagagcagtgatggctaccatgagttctgaacccttcctggctgtttctaagcagcccagatgcaaaatgtccaacaatacagtctcctatcagaaaaaaaaaaaaagtaacatttaggacagatgattaggaatgaatcatgaaaacttggcttaattttttcaatattattttgctacaaaacgtaaagaaaaacaaccctgtcttttactccctctgtcatacacaaatagaagtactagattgggtgctaggagcattcttcctttgtcaaatccaatgagactccgagtgctgggattatctttgctgctttatctgtgggtgccaacgccaccgtagatggcatttgcccattgcaaggctttatcagtgttagacactgctgtaggagacaggaagcagttccagggctaatggcaatgaaacgagggtcagtatttctttttcacccactgttgctttgggtgggttttatcacttgtgtttattttattattactgagtgatagggaggggagcaaataagagagttgatgctttgcttccgaaatctatggagcctcagcattgtattgaaatgtcactccccgctgtgtttcatgagcctcccagcgctttgttcctcgggcagtgctgatcattacttctgcaaccataaattttgcctcctcttctacaactattttatgtcagggaagatgaagtgaccctctatttctttgtacatttcccctttccaccttccctatgattaaaaatacatcttgggtctctgcccagggttttcatagggttgctttccaaccatttttacaaagatagttgactgtttcttatatcagatatttccagagaaagaatgttcttaattaagatgccattcctgggaaataatctcaggacttcctgatgcagtttaaacttgttccatctgtcctcttccttaagggtgctaaaatgtcatattttattaaatatttgttgaaaaacccagttgcatattcacagtgatatctttcttgtggccttttctgtactacagaaaatattagtcagacttcaagaagaaaagctctggaggggaagggggcaggatggattatggtaaaatactttggaaattgctagactaagcaaatttaaacaggcttatctattgcatggctcctgggatgtatggtgaatgcccaaggggagggggagaacatgagcatttcccaatcttatttgacacaggatcttgttgcccaagcacctactgtattttctaccattctaggaaatgcagtttgagaaatgcttaatcttttggtaggaacccaaaggactaagacaaaatcatagacttgggatttgcctttctttatcagcaccacattgcagctgataggggaaaaggatttttcttctgcctgtacctcttggtaagttaggaatagtagaggggaacgggagggaacctgggccaggagtgagcacataggggtggggagggggagtgtaggtgccatgggcagtgctcaccactgaggcactcaatgatttgaaaagcattggttaaacaaacgaaaatcaactgagttctcctgaaaagccaataagcatctggaagtctgtactaaggaattgctatcttcatttccattcttagagacacctacattgatgctttcaactctatatgaaagtcaggaagcatggcagggaggaagggaggggaaaagcagggcctacatggagagtctttactaggagagaccagcttcatggaaatgacattatgcccagaaatagatggtgtttttaaaaatacacataagtagagctttaagttaaatcttaatgaaagaaccaaatcagaaaaagcagactggtttcttttaaaaagagaggttccggagcccctgctgtggcctccaagaatctagggtgttttaggccacctacatgggttctgcagagtcaggagtttgcatgcatccatctctaccctgttagatgtacaatgtggctccccccagcaaggcctactcacctgccagtggatgccgatcagcactggaaatgaattcttgccacagtgatttatcctgtggaaccctaaactaaatgggaaataggcagccacagtattccccaataaaaggaaggaagcccagtgaaatgtcatattggcaccaaagaaagatactgggtttacttgaatatgcaaaactttggccaagaatataccagatttatttaaccacttcctcaagttatttttctgggctgaggcaaggaaaaaataaataccatttttcaagtacagttacacaagtaggtaagtatgagatatttgaggtagagcttttcattctctgattacagattattttaaatgtggctattaaaaatcaatttccttttttgatatgcagcactcttcgtatctacctatccatatgtctcacatatatatgcctctggccagtggagaaactgaattacaatgaaaaattatcttaaagatgccaaggcaggccttggctccctaatgctgagccctttgcactttggcagagaatttttgtcagaactgtcccaggtattcaaatgccattcttctgcattgttctataactccagctacagaatgaacacctgccaccacatgacccaattagacatcctagaaaggggtatccaatcttttggcttccttgggccacattggaagaataagaattgtcttgagccacaaataaaatatactaacactaacgatagctgatgagctataaaaataaataaataaataaataaaatttaaaaaataaaaataaaaaaagtttgtgcataattctcatgttttaggaaagtttacaaattcgtgttgggccacattcaaagccatcctgggccacatgtggcctgtgggccatgggttgggcatgcttatcctagaagtatctagtttgttatatgaaattgctaggaatgaagcatccatttcaaatagcctgctaactttagccttgctcaaggcatttagtccttttgtaatctcttttttgtcttatctgatttaatttgaacaaaccttactttacacttttcatatttttgttgcattttgttcaagaacattatattgcattattattgtatattgtaatttcttaaaggtaaaggcagcctctaactgcaaataaaacatctcaaataagacgtttcaaaaaataagaccaaataaggcagcatgttaggatctggcatcatatgtccctaatagtgtctagatttgttaatattggtaattcaagatagagttaagtaatgatatttatccagctaatggataaatcttcagcaggctccgattttgttgtatcatttaggtgacatctacataatccgatagcagatggctgatgagagcatctcagatagcttgcctgtgacaaacaagacaatatgtggattcagctaggtcaggattgtgtagaatcagccctagaagctgagaccaagacattgctgcataaacaggaggaaaaccactggtattctagcaggaggtctccaggggctgctggaccctccatagtcttaatgataaagcctgccttgtacacttaagcacatgactttttatggaagatgcatacccaagaatttaagtagtgaatttttttcccctcaattactgttggcaatcgaatgtacagttgtcttgttctccctctgccctagtttcctagaactactgtaacaaataaccacagactgggtggtttaaaacagcagagatttatggaggctagaagcctgagactaagtggtgggcagggccatgccctctctgaaggctctcgggaagaatccttccttgcctctttctggcttctggtggcttcagacagtccttggcattccttggcttgaagatgcaccactccagtctctgcctctgttgtcacatggccttcttccctgtgactccatgttctctcccttcttatagcgacactagtgattggatttagggcccaccctgatctagtaggatctcatttcagtcctcttctaaaacctaagcaaagaccctgtttataaataacatcacgttctgaagttctaggtagacaggagttttggtggacactattcaacctactccaccctcttaattctgcttttaatttttattttttattctttatgagacagagtcttgctctgtcgcccaggctgcagtgcagtggcatgatctcagcttactgcaacctccacttgccaggttcaagcaattctcctgcctcagcctcccgagtagctgggattacaggtgtgcaccaccacacggggccaatttgtgtgtgtgtgtgtttgtgtgtgtgtgtgtgtgtgtgtgtgtgtgtgtatttttagtaaagataggatttcaccatgttgaccaggctgatcttaaattcttgacctcaaatgatccacccacctcagcctcccaaagtactgggattacaggcatgagccaccgtgaccggcctccgctttattttcttagtactccttccattcatcattcttcaataactattttaaagcttattaagaataaattttgttaggaatgcctatcaggcatatgagttatataaagtgctatattatttaactaaaccattaactttctgataaaatgacaaagaaatcattttttgcactaagatattcctaaattcatctttttatagaaaagttgaaagcccatctaagtatctaccagtggggaatagtttgatatagaaaatcaatgtgacatttcccatttactaaaaataattttcagaactatgccgatataatatatgcatcaatgaaaatgcaggttatataacttctaataaaccatggaaaatatgtattcatgtgcaaaaatgacacaaaaatatacaaaaatgcttggttaggatagatggatcatttaatatcttgctttattgattctttaatgtcttgctttattgattctgtaacttgttttaagtaattaaagtattatctgttattcctatggaaaagactaccagttactcctcaaaaatgccatatactctcttcaggcccccagactgattatatgttattaaaaattagcgagtatttgtttcctaaccacccagtcctgtgtgttatcactgaaatgtgccattgggattggatgcttggcaaaacatatctgaagtgagaatgtacagagaagcatagaccaagtatatctcctccaaagaagggcagaaaagtttaatggatacaagttaaacctcactctgcctcataatggtgtggacaagtggcaagaagaggcatttgggagtcaggcacaaagagttgtgctaaaagtctaggttggtcaaattgtgtcttcatgtgctgaaggaccttaatcatgcccacttcatggcatcctgatgacgatgagaaagccatgtggttctcctaacacagcatcacctcatggttgaccagtgaccacagggcagaaggatgctgagtagaaagacatgaattggcatcagaggagtcttctgaacattgcatttcctctctaagcaatggaggtagaccctgtgtctcctccagacactactgactgaagagagatgtcagcaccatcagcaccactaaaagtaatgttgggagccaaagtattgccatgagaatcaccgaattgttgtgaagagagatagcagcagtatgaatgcagagatcgagttgccacctcctgcaagcacctctaaaagtaatgttgggagccaaagtattgccatgagaatcaccgaattgctgtgaagagagatagcagcagtatgaatgcagagatggagttgccacctcctgcaagctgccacctcctgagcctacttgaggaacttagcgtcacaaatgggacaaccagcctttatgtccctcaatgtgatgcatataaagtcacagcacctcctagaagtatccttaaagaaagatgtcaagagggattgctttagactaaaattgacttaagagacataattatcagagacatagtgtgaaatctggtaccttgattcaagcaatgtaactataaataggggaaatattaagatgggctgtgtattatatcatagtaaagaattacgccaattttgttggatatagcattgggatggttggctccaaattaaatttagagctgcagagacaagttattaggaattaaatgttctgatatatggaattcaccttaaaatatttcaatagagaggaaagagaaaaaatgaaaggaatataaaggaaatgtggcaaacaaatgtttataattgttgggttatcatcataaatatatgaggggttattgtactgttctctccacttttgtgtatacttgaaatgttttgtaacaaagagtttaaaatatataaataaattcctagaatattaacttgccaaaaataattgtctgtgatttttttttcctgagcaagatttaagaactaatttttccacagctgttgttgagaggcaaagagttcttagggatcatgggtgataaaaacagaccttctcacatgccactggtgggagaataaattgatgcaatttcggtggagtgcaatttggcaataactaccataggacaaatactcttacccatcattctaacttctaagaatctattctgtaaatatatgtagaggtatgctacgaaatgttcaaagacattcactacaatactttaatagcaaagaactggaaggacaagctgtctaccaataggaactggttaaagaaattatcaccattcagagaatggaaagtttaagcaacccttataattaatgtattagagctatattgccaatatgagaatgtttcccaagatatttgacattaaaaaatggtgcagaaaactatgaacccatttggagttttaaaaaatatcagaaaggatacaagaaatggataataatagttaccttctgggcgtaggattggcaggagagaaagttttcacttttcattttatatatttgaatgtttaccatgtgcagatgttattttattttatttgtttattattatttttttctgagacggagtctcactctgtcacccagcctggagtacattggcacgatctctgctcactgcaacctccgcctcctgggttcaagtgactctcctgcctcagcttctcaagtagctgagattacaggcatgcgccaccaagcccagctaatttttgtatttttagtaaagacggggtttcaccatgttgcctaggctggtcttgaactcgtgacctcaggtgatccacccttctcgtgttcccaaagtactgggattaccggcgtgagctactgcgtccggccaaccatgtgcaaatgttattttctgttataaaaaggaaaagaaaaaaaaattgaaacctagagaattatgtgccccgtgtactgagaatgttatcttaagaattatcctaagattgtaattaggaaggcgattctgttagggaaaactttataaacttacacagtatttaaaatgtataaattatggatggtttcaagttaacaagaataattttgccttctatagtatgagtaaattgtgcacgattatatgaaactctgaaagtacttggaaatcttcaaatggcattaatataaaatattaaattctactatcttttaagttcaagttatacctgagaaaacactagagaaagatttcattttgtctaccatggaaccaaaattggctttgaatatgtattatccttctgtatcgaaaaataagacctacctgcctcaggtactttttgtgttcatcatctcattgaattatcatgattattctgcagggcaggtggtatccaccctaatttccagataaagaaactgaggctggggacattaatcaacttgctgaaagtcacacacaagtgaagaaacagtctagaacccacacacttcactcagtttgtcctgacactttgcctccttcatatcaggaaaaactttgtatcaggaaaaactaaataaaaaaatcatctggtctttggcccttgcttttaactcctttcttgttttctgcaactagctgtgccttcctcagtgtgtcttatgtcctaggaaaagattattaacagaaagcacaacaggtatccaggattgtagtttattaagcagagttttaatgaatattttcagtaaaacagagaattaacggctcattgggtttttttttcccctagatatcgtggatgctttatcagatccaaagaaatttctctcaattacagaaaagagagcagaccaaatgagagctatgggcattgaaactgtaagtagaaatggttgattaaaggtggccaagttgtgggagtttgattatcaaacagtgtttacaaaaacaagacaaagtaatgaattagcaaatttaaggagggtttttaaaactgagctcatcaattcaacaatagttaactttctacaaaagtgtggcatgtttaataaaatgtgactgccatcagaaaaatccacttcatcatcagtggcttaactcacatctggggaccccttccccattagaaagaaaatgcaaaacatttgttatacttttgggaaagtttaaaatgtaggtggagcatttctaatcagaaaaatgcaacatccgaaaagttccaaaattcaaaaccttttgagtgctgacattggatagtcatacctttgctttttgaagtttcactgtacataaactttctttcatgaacaaaattactaaaaatattgtataaaattaccttcaggctgtgtataagttgtatataaaacataaatgaattttctgtttagacttgggtcccatccccaggatacctcattatgtatatgtaaatgttccaaaatctgatatccaaaacatttctggtctcaagcatttcagataagggatattcaaactgtactgtacaggatgtttctatgatacactgaaataccagttaacctagttcagtgaattaatgataattgctttttatttttaattatttattttttaacagataggatctcgctctgtttcccaggctggagtgcagtagtgtgatcatagctgactataaacttaaacttctgggctcaagccatccttccacctcagcctcctcagcagttgggactacagatgcatgccactgtgcctggctaatttttttactttttttgtcaagacagggtctcactctgttgcctaggttggtgtcaaactcttggcctcaagcaatcctcccaccttgacctgccaaagcattgaaattactggcgtgagccaccatgcccagccaaaatggcgtttattattgatttttcactgtttgccagccttacatcccaaccttctcccattccagtgcacacgtggattgtttctttgtttttaaatgttctctttaccagactcctcagtttggaatggatgtagcatctctccaatagctagaaaaagagaaagtattctctgcttgttaagaagttggatcttctttccttggctggatcctttgcctttaagagagtagaagtctaggaagagtatggtagaagtttactggattcagtaaaataaagaatgtacaagatatttgaccttgagtgacattcatttgggtcaatgtaaatgtttctgttccagagtgacatagccgacgtgcccagtgacacttccaaaaatgacaagaaaggaaaggccaacaccgccaaagcaaatgtgacccctcagagtagctctgagctcagaccaaccaccacggctgccctggcctctggtgtggaagccaagaaaggtgagagagagccgttgggttccttatcttctgcacccaccttaattacacagtgtacaatatctatagctttaggaaatatataaattcgaagttctttgtgggaaagaaccttttacatagtgatgttaactaattcatccccactctcttccagaccctcccataggtagttacctggacaggccgtgggctcatgaaccaacatagttattcctattggacatttctaaattctcatactgataattttccctcataagtagaaacatgattatttgtttgtaaaattatcaaatgagcacttgaaggccaattccatgtgcttacctgtagatgaaacaaaagatcattaagaggtggcatcacaaagaatcacgtgtctcatattcagccagtatgtagggaaacaactgtgctggttattttaattggtttccatatgaattggccagacatccattgattggatggtgcccattccatactggagggaaagtgggcagggagaatgctgatagggagtggcaaggagttcatttttcttgttctggaaagaattctggggtcatcctgagaaggtcatgggaaatgagtcaaaggagtatttgaagaaaattatagtcttggcagaagaattcattgaaagtgggcatgctaagggcaaggtaagaattatgatactcatgcttctgttataacacacctatcacattgtgttaataaagtattaacaaccagagaaagaggtcattgcagatgagaccacacctcatcatcagtgtgtccctggaaccatgcctagttaaaatctagtagtctattttctcaggaagtaaagcgctgtttaatgaatgataggggcaaggaaatctagattaagttggaaattgtcaaaaggaaggaagaatagaaataagttggcagcttgaggccaggtgcagtggctcatgcctgtaatcccagcactttgagaggccgaagcgggcagatcatgaggtcaggagatcgagaccatcctggctaacatgttgaaaccccgtctctactaaaaatacaaaaaattagccaggcatggtggcgagcccctgtagtcccagctgctcaggaggctgaggcaggagaatggcgtgagcccgggaggcggagcttgcagtgagctgagatagcgccactgcagtccggcctgggtgaaagagggagactatatcttaaaaaaaaaaaaaaaaaagaaagaaagaaataagttggcagctttgatatgggccttaggcagaaaggggctttttggtaactcagacttcaaggacagatcccagagatagattgtaccattgagagaagtagaggagttaggaggaggagctgcttttggtaaggaagatgattttggttctgtatatcactgaggacaagctgttgctgatacatctgggcagaaatatgcaattaccaaatctatatcaggtggagaagaagaaggagggacagagaaacagaataagaatacttagaaggcagaatgaatggggaaaaaagagaaaagagagatctatgttctaagaagaattagttttgagaagatgctgtagacaagtccagagaagtgaagactacaaaattatagttgaaccaggggtgattggatgatgaaggtagaaacatggttaaaaaaatgtgagacataatttaagacataaaatggttgttctggaggacagtagcatgttggtaggaactaataaagaaaaacaaggaaaatgcaaaagagagtacatggtaaaacaaggctataaggaagatctgaatcaacagaaagggtgaaattcagctggataaggaaggaagagatatgttctgtctgagctaagaagaatgatgagtgaatagaagtttcaggatagacaggaagaattcttgacagacggtgtatcagtcagcttatgctgcataacaaatgacctcaaattttagtagcttaagacaaccaccatttattgagatcatgtttcattgggttggttggtctaagctggcttggctaatctctgtgtcttgcttatgcacctgtgatcagctgataggttgactggaaggtagatgtgggatgaccttatgcacacatctgtcatttggcaagttgtttcacattatcctgaagcctgagcaggcttgttcatatggtactccctgagtttaaagagcagcccttttccagcctctgctagtctcccattggctacagcaggtcacaaagtgaaccaatattcaaggggtagagaaatagactctacctcttgattagaggagaaagaaatagtggtcatttttgtagtataacacagatagattttatctgatctaagaagttggttaggtggctgctctctgctgagaaacgtagaggtagaactgaaaaacagcagtatagaaaagctttggagttgcccctggctggaatagaatgatccacaggaaataaggagaaggtctgccacatagcacacaggaccctggtgagggttggtggtgtgtactaagttgatgtagcttgatctcattacttcttcagcagtgcccagaaactcagcaacaactgtggacaaagtacagcttagggagttgcaagcctgaaattatcacaatttatatggtctgggaccaaaagtttgaagaccattaagttatgacactgtaacagttggctattgatgtgtaacaagcaatcacaaaagtcagtaatttaaataagtaagcatctattatagctcatgaggttgtctgggtggcttttctggttatgggaggattagtatcagtgactcagctgatcttagctatgcttattcaaatgtttggggttcagctaaagtgtcattggctgggacaagtgggctgtcttccttgtggactctcatctttcatcagcttagcctgggcttgttcacatggtagttgcagtgttctaaaatggaggtgaaagtacagatgctccttgacttatgacagagttacatcctcataagctgaacatatcattaagtcaaaaatgtgtttaatatctaagctaccgaacatcatagcttagcttagtctagcctattttaaatgtgctcagaacacctacattagtctacagttgggcaaaatcatctaacacaaagcctattttataataaagtgttaaatatttcgtgtaacttattaaatgcagtacagtgtagagtatacagctgattgggagctgaggcttgctgcagccccagcgcatatccctagcttaggaaaagatcaaaattcacaattcaacatatgctctctactgaatgcatatcacttttgcttcatcacaaagttgaaccactgtaagttgaaccatctgtatgtcaggttccttgatgagtcctagacttagaactggcatggcatcctttccactacattctgtcatcccaagcaagtcacatggcccagctcagattcaagagttggggaaacagattccacatattgatgggagaaattccaaagtcacatgtaagtaggtgtggaaacagggaggggtggaattttttggccatttttgcactcagtctgccaccctgatcataatatataggttaatgttccagtggggtagatactagaggagagagacttttctaggaaaggaaaaggttaaagggaaccaggaacaagatgaaagtaaaaagcttgcttggtaggtgtgagggagtgagtgaagttggcaggatggagattgcagtcagaaagaggttactctaagctacttgtcttggaggaagggcagtttcaagcagtgttaacatcccgtttacaactgtcagtgggaggtgaggtaaagtagagatgaagatttctagaatggaaggcatcatgaaaacagaaagaaaagtcactcagcacattcttctcatgcatattgaatcactgtgttggacgtctgggaatgcctgcataggaaaaccacaattcagatatgaagttcatggggccgggcagtgtgtgacctaaaaggacacatgtggaggtagttaggctcagcagagcctggtgtaagtgagaggtctgttcttttgtatgatagtttttaggagaatggcatggaagtacaagagagaagtctataggtgttcttcccacgcctctccatggattggggtggggtggggaataaactctactccaggagcctttgggggaagtgatgtcatttgagaaagcaagcctccatttctttccagaaaactgtcttaatttgagtcaccccaaagaccctgagagaaggcttccagtgcaagtagtttattctgggaggcagtggacatggatagagatgtgaagaagtgacaccagggagggaaggcagccagtaattagaatgttttaaagccagttgccagtaggcacctggaacttaatgccctggagaaactctgggggctggtattggacatacttctcagaggtctcctcttagagggatgagggagctggggaatgtataccctgactcctgtcagccttttcttgagggttcccgtggaagggataaattctcggcattcagacgctggcaattggaagtgaactagaagagctgatgtagagagggcatagtgtgtggctggagcagacggcatttgctgcagacctctatgaaggtggggaggtgtgaaattccaaactgtttttcttagacattcagccaaacagcaacaactgcaccaacacgacttttttttttttttctgattttaagaacaaaggattaagaacacccagctcctaacttccagattagcaattaagagaaaacaagttattgttaaggaactatgctgatatgaacaaaaactttatgtagtgaaacttcaattagctaaaacccaaaatgtgctgcctaacctactttcataccagggaagcctgtagacctgcacagtcctatatagtagccactaaccacatggggctaccactaaccacatagggctatttgaatttatttaacaattaacttaaaagttaaaccttgagttcctcattcacactagccacatttcaggtgctcaagagccacagatggctagaggccgtcagttggacagacccacgcatggaacattcccattattgtgcaaagctctatgaggaaggctgttcttggcacgcagatggaactgtcctcttctgtagagtgtggtttttttttttctaactaaatcacttatgggaatcaacatttttacaaattgtgtctttcccccaaaacacaaaaccaggtagttgagggaagtttatgtttttgtaggttccttttaatcaagacttagttgaaccaagacaaaaagaaaataaaaattgagagagagagtgtaagtttcatcagactgggtcaaactcagaatttgctagatctctggaggaccttgcatactccccaaatcctgtatgttcattttacagatgagagagctgaggcctaaagacagggagctctttgtgtgccaggagtcactcccttgccttaccctgcctcagtcactagagagacagcttgtgaaagccaacttaggagatcagtagagagccccatggaccctttataccccgatcataaaatgttacagatcacaaggctgatttccctcagccaaaactttccttctgcggcctgaccaccctatcattgaatgtgcacatcttaaaatgaataaaagggaaaaacaagagcctgggacttgatgcctatctttcttgaatatatcatacctagcctttgggattctaatggaaatcaattacagcacagagtacacattcattttgtttgcctaagatgaaaatctgcagtcaaacagaaactgtttgaggatctggctacaactgttgttgccatgacaacacctggcctagcatcactcagatagcaggatgacttagtgtattaccctagctcctcctggtatgctcctgttatacactggtttgattttattatttcctgtatgtttaaggcattgctgtgctcaatagcacattgcttaaatgctaagattgaatttggtaaaagggagaagccagaaaaaaatgttttattctttcacaatgactgaattgagaatagagttgggaattagttgactggcatgatatgccttgaaatacaaaggtaagaataaggataatagatacttttgtgcctgatcagctcccctttatgggttcactatcccatctcacagctcctatgaattttggctgattgggcatttcagctgcccttctccatagaattgccctgggaccatgagagttcccttgcctgaaaggttttgtgaaacctctgtagcactcagctgattgatccagggttacaaatgcccagcctctttttgccaaggtggaatgactcttgggtgccatttgtactgaagagctccctgcaggatcagactgaggctggatttctactggaaacacaccctaccttgttcctctgccctgctccacttctttcattcccttaggggtttctcctgagagtctgccctcaatcaatcacttgcacatgaatccccttctcaggctctgcttgtaggaaacctgacctaagttaagacattcaacatttcaattgtccagttaattgctttgtaataggaacttaagatgtttatattcatcatatgtaaagctgcttcaaagtctttcgatgagatttcgatatgtcagttctatattaccagttattctctctgatttttagtatacatagtgacttaattttttttgtttgtttaggtattgaacttatccctcaagtaaggatagaagacttaaagcagatgaaggtaaaattgcttgactattttgcaagcactcttgtattacacatattggtgacaccaatatatttttgtttctcaccaagtgtaatcattgtgattacaaaaagaaaaaacaaaaaacctatttttgattctatttttctcccaaaggcttacttgaagcatttaaagaaacagcagaaggagctaaattctttaaagaagaaacatgcaaaggtacagtgctctacagctactattttgtgttatgtatggatgaatcatttgtagccaaaaacactactttgaagctgataccagaccacttaacagtaataactcattctaactggttaacaatgaaattaaaaaatagaatcggtttgggagtgcttgtcacttgtttgtagtctgcatttctaacaattctttcaaatgcataacaaagcttcatccatttaaaaattgtttcactaggccgggcacagtggctcacgcctgtaatcccagcactttgggaggccaaggtgggtagaataggatgtcaggagtttgagaccagcctgaccaacatggtaaaacctgtctctactaaaaatacaaaaattagctgggtgtggtgacatacccctgtaatcccagctactcaggaggctgaggcaggagaatcgctttaacccgggaggcagaggttgcagtgagctgagatcgtgccattgcattccagtgtaggtgatagagtaagactccatctcaaaaaaaaagaaaaattatttcactaataacatgactatataaaatattgaagaccagctcacaattctagccactagttacctaaattgccaggtcactgtcacatagtttgccatacacactggtgcatggagggagatgctagcaatctgtcaacctcccactcacagcacctagagagagaacacttgtcactttttctcccttatgtaaatcttgcccagtagcctacttctgaaatagatttatttttgctttttacccataagaagtggtattttgacagtgattgtgaaaaattacaagagctagttgcaaattgtaagagaacagcaggaggtggccccaggaattctcctgtgggttgaaaaacgtcatggccctcaaacatcgtcacttccagactccctcacaggtaaagaagaaaaaggtagtacctctttccttcctaagaacatataataaccagctgctgctggtaggataatgtctgtcctcttttattaagggcaatgagagcaagagaaacttaatttataatttattaatttgaaagaacttctgagttcttttaaactaatcttgcattcctgtttctttattctctgacccaagcctcaaaccaaggcatgtccttcagaacttggcttgagtgatgtaccttttaatcattccacgtattgagatgccgagaacattgtctggaaccctgtcccctgtcatttctttaagagtttgtgctaacactgattttttgagaagtcatttctttaagagtttatcctaacactgattttttttagaagttaggcctaatcttatcctagtaatgttccctgtattacagaactgttgggctcaatggatttgctgatacagtcacttcacttcaaagactgtttctaagtttcatgaataattccattcagtgaaattccttacattgctcaatggggttattggagacagaacaatttaaagtaggggcttcaatgttgttggttattgacaacaggctgaactatggaaagccaacagaaaaagagtaagaatgagaaataagagagaaagcaccttaaatgactttaattatttggaatagagtggatgcccgtatgctgcagcactatctaacagatttttcttgcatttaaattggatctcttttattgagcagacacctcagtggcctttgggctagttggaaacataaagattttggcttcatttaatattttcttgaggcatggccagaaaatatgctgtggcgggtggtaataatagcagcaataatagcagctagaattcctgcatgctcagtaattctcagatgctgtgctcagcaccttatatgcattgtctcatttaagactctaccctgtaaggtaaattctatgtgagtctccatttatatgtgagggaattaggaattagtgaagttatctgatgtcccagagttaggaagcagcatagctgatatttgaaccaaaatcaagagtccagaatccatagtcttgcaccatactcctgtgtaggatatgggatgctcactaagtggacaagttccctcattgggtcaaatgcagtgacagcacatgggacattagggaaaatcactatcaactttgggcagtgttgatatactgctgattatcaggactgtgactaaggaaggatgcccctcaatttttagaacttaacctacatcagagttgtccattaactccctggagccatcatgcccggcccaagctaacttctaagatgaagaatataatgaatatttacttgcctaatatacaccgatgccagctctgttaacatattgtctttaggcgagacatggtggctcatgcatgtaatcccagcactttgggaggccaaggcaagcagatctcacctgaagtcaggagtttaagaccagcctggccaacatggcaaaaccctgtctctagtaaaaatacaaaagttagccaggcatggtggcaggtgcctgtaatcccagctacttgggaggctgaggcaggagaatcacttgaacccaggaggcggaggttgcagtgagctgagattgtgccactgcactccagcctgggtgacaagagcaagactctgtctcaaaaacaaaacagaacaaacaacaacaacaacaacaaaaacatgttgtctttaaaaccaaaaaatgaaaaactgtttaaggagaggggaacaatgtggtgaatctattaccattggacatacttcatgcctgatctccatatgacgtgtttatcctaacactgatttttctgtcagtcaacacttttaaagtggcaatactagcttgtacatattgatacttgcttaagcacatattcttaggtattctcataacagttatataaaggagtactataattatatgagttttgtatctgttagcttttgcagggtaacaaaccaccctaaaatgtagtgacttaaaacaatgaccatttatttggctcacaattttgtgcatcagtagttggagctgggtttagctggatggttcttctggtctcagctgtattcactcatgaatctgctgttactaccagtttggttggcagatgggggactggctgatttaggtcagcctctgttaaaccacttcctctctgctttatgtggtctcctgtcttccagcaggctagtccaggcttgttcacatggctggggtcctgagagaccaagcagatcaagcatagtttcttgtggccccagctcagaactaacacaccatcacttccacctcattttttggccaaagtaggtcctaagtctggccttatgaggtctctaccttttgacaggtgacaaagttacatcagaagtgggagtggatgcagaaagggaaataactgtggccatttttatagcctaccggctattcaacagattagcttattaatacttaaaaaaacacagcttcattaaatcatctagtttttaagtggtggagtcaggatttgaaccaaattcagcccggcttgagaactcagacttgtaaccactatactcagctgcctctgatgtttctcacactaatttttcttctcttcacacatctttttctttatggtctcactaacaggtttttaagagcaatcatgaacctatcagggcacaaatatcttgggttccttcaggactggtttttcaacataaggtcattgggccaagagctggaggctttacaaaaatatgtattcttatgcctatctgacacttagctatcatctctaagaaaagaatataggaaatacagaaatacattttagataaactcctctcctctgcatgctaaattttgaggactgtttttttaggaacattatgtagcactttttactatcttttgagcccttagtagaaaccccactaatcgcctgcaaagacacttatcaagcctccttaaagaaacagaggttttatcctcttgccacataatagtaagaattaattcctacatcctttctgtgaaaggacatctacagctcttttataatagttttcagccacccaacatggagctaaggcttaccaccccaaagccttatgtcataaaatgacctgctgatgaagaaatatgacctgggctgcactctccctactagtgtgcccctggcccaaacagcccttggtagctaagaacagggactattatttagtctatatccagcaactgtagggagatctcagctcttacatatcagcctagatcaagcttgtccaacctgcatgcagctcccaggccacatgcagcttaggatggctttgaatgcagcccaacacaaatttgtagactttcttaaaacatgagatttatgcacagactttttttttttttttctctcattggctatcattagtgtcagcgttttatgtgtggcccaagacaattctttttccaatgtggcccaaggaagccaaaagatttgccactgctggcctagataaataattctactttttagacttaaagagaagcagagaatctatgaactatatctcagcagtttaagaaataaatgtatggtcccaaggagagcttatttccaaacttgcaggttagctaccagatagaaaggaacagtggggtgagtgtgaggttctgccatttgcaaataggtgtgcaatttgctgttaggatattgagaagaaaagatgggggtaacgaccatttgcaccccagatggatataaaaatgctcattaaaatgtctatttttggaaaatggcaatgatcaactgcatttgaccctctgaatgtactggcaatcaaacttctacttgtctcatactttctagaaccacttcaattcgaaatggaaactagggtaatggtttttcaagtgtctattatatgagacacagaaaaaggagaattaattaacaataatcctcccccagcacatgactcattgggatccagagctgcagttactttcattaagagacaggcatgcttttcaattgtccaatgaggtcaattccttagagccaaaaatgtaaaacccaaagttggatacatatctccagtaacgtgttagaaggggaattacaattcaaatgcctatggggtccaagcaggaagtagctgagggaagttggacaggtgttgactccataaaagctgggagcactcatctctatccacaggccaagtcagtctgagctaccaccattggtgcctggagagtagatgggtcagtcgtgtcctcttaaaggagagtcaaaaaatcagaaagcttatctgaatttcctgatcttttactatcggcgtctaattcaacctctttttgaaactgcgtaggaaaaaacaaaacaaaatccaaaactaaaaactacatctgcaggcaggatacattccttaggccaccagtttgcagtatcaacattaaatgagtcaaatgaaatgcctgagaagcctactaaactctggcatttttagtaaagctactgatggaaaattttctctttgctatgcaagcaatttagccgacagcaccaagactgttgttaaactcatcaattttaattcatggtcagaccttagtaccagacctataacttagttttgcagtggaaaggggcagagacacagcagttgccctcagagtccgcctattggtaatctcagagttacatgctgagcaaacatgatttactccaatttttcagcaccctctgtggtgcgatcattcacgcccatagtcacatcagtcacaagaatgaattgcagcagcagttttccccaaaagaagctgaatttactcttaacttggataagaaacgtacacaaattcttctgaatgctatacatgtttttccccaaaatgtcccagttaagatttactttaagttaacacatttaattttggtactcttggcttgaatgaatgagaaatgtatgtctcttcaatagtgtttcatgatttaactaaggaccaaaagaataaaaccaataatggacattttttttaagctaagatggacttagagatcatttcatgcctccttcattttacagcacaatgagctgagacttgaccagagtcacatggaaatcagtaattaggatccccatttctttctgaaaggacaagtggtgtctgggaatcaagttatcccaaaacacttcagcaatcactgcctaccacacagggatggagttttgaataaaaagagaaacagagacaatttttcaggaccagctttcctgttactgacattaattatagtcactttaattcaatatgctttcagtttttcaaattatttttgcatatgtttagtaaccttgcatctcataagcaactcatgaattcggttaggcaaaggtacctaactcagttttcttttcttttcttttcttttttttttttttttttttgagatggagtcttgctctgtcatgcagtggcatgatctcgactcactgcaacctatgcctcccgggttcaagcaattctcgtccctcagcctccagagtagctgggattacaggagtgcaccaccatgcccggctaatttttgtatttttagtagagttgggtttttgccatgttagccaggctagtctcgaactcctgacctcaggtgatttatgcgcctcagcctcccaaagtcctgggattacaggcatgggctactgtgcccagccctaactcagttttctaataaagacattgaggcctgggaagatttatatatgttacacaagggcagttgtttaattattggctgagctgggaccagaatctaagtcctcttgctattttcctatgctgactttttattcatgcgataaatacttattgagcatatactttgtaccaggctttgtgccatgtactggtaaagagaaaagacctgccctgctcttgtagagcatattacatagagttgaatccatcataaacaactttgtggtacaaagagccctattcctcatatctaattggattaataaggttcaccaaaatattttcttaggaaaaaaatctgtgtcaatttacatccaagcctcaaagtctctacttgtcctgttctgcactaaaatatttaaagaaatagccttcaccctcctttcaatgatatttgcaagataatataggactgtggcacttctgatatattttgagacctgcagaaagccccttatttatttaattttttgcccaggaaaaattaacacatgggttagccaaccataatgatttctaaatcttagaaagaagactaggaggagggcattttagtaggtaccaaagtattacaagagtagttaaatacattcagggatacatcaacatgttcctctattcctggggcagtagatcaagcatggaggaaacatttattgatttaattagtctgattgatatccctatctcaagtcactctctgtgtgttatcatgggtattgaatagtatagataggtttgtatgtcactgtgttttgaataagctgtaacacacatttgatacattagattcacttttaatcctaacaaccctatgaagtaaatgtcactatcccaattataaagatgagcatactctggaaaggtaagtgactcaccccagcactgaaaaacccatgtccttaacccagtgccacattgcagaagctctggaggaaatgtgtttatagcacaaaggtgcacacacattggtaatatggctagatttatggggcattccaattacaaattaagcccagatccacagcaagcccacctagcctttgttcccactgtaagttcctatgttgggaatctccctatccagcatcacccttctccactccttctcctaaagacaagaatgctgaggccttgtgcatgaatgcgtttctaaagaatttatatataaatgaattgtagatcaagtcctgtgttaaatctcttagctgggaaattaaggaagtcttggtaaagacttaaaaattccttccccatttatattttatgaaaccgttaaaagaagttcatgaattagatttgcataaagtcaagcctaccttagaaagaaaataaatttgcttttaaattaaggcactattttcttcaataagtgaaaggaaatatgacggtgagaggggttatataacctgaacaacatgtacacccattccagtcatgaatagcatcccatttttctggttctcaagagtaaggttaggctataacatcaagtgtcatttagagttggaaatttctgattgtactgatttcctctgtgcttgggaggctgagcagctaaagaaatctgatttcatataagtcattggctgtagctaaatgcctttttcattgtccaggaagaaataatgtttatattgaaatacctactttccaaagcattgcagccccaatttcaatggttacgtgaagcagatgggaaaatgttttaaatatctgtaaaacagaaggccatagctcctgaacactttatcctcataaactgcttctagataagtaagccagtgaaaatattaagtgatgtagattcaaattcagctgatggtgacaaacacagtgatgcctctcattatataataatggcattcaagagctccaaaatgtgcaggtgtttagaaaccatgtcacatgatgaatagttacatttagcatatacaagagaagaaacatggtggctgaacttgcatgtttgaggaccaatgtgtggaaggggcagtaggctaattacatgtctcaaacagcagaacaaagatgaatgggtggaaatactacagagatgtgtatatgtagaagaaaggacttcgagatgattggcactacccactgctgagcaggagtgcatttgaactgggcatgttcactagactgaggctagagactcccatgttgggaatgcccttggacaaaaaaaccggtgttgaatgggagatctggagtctgtactgttctcagatttggttattccttgactttctaaatgaagactctagggaagctggtgaaagttatgccagccctatatggtgtgagccatgctaagagtccaattcataactgcaaatccttcttgttcaggaacacagtaccatgcagaagttacactgcacgcaagttgacaaaattgtggcacagtatgacaaagagaagtcgactcatgagaaaatcctagagaaggcaatgaagaagaaggggtaatactgtttatttccttctgaagactttctctatgtttatattttgtcttttcccacagttttgctgctgtttaggtcaaggaagaacttagtgttgacttgattttcatcattaaaaattattcctgggaagtaagaaactcattcattttaaatgctctaacatcataacaggtcaatgagtggatgtagcttctggtttggggaaggttctcagcagagattctgatatcttttaattcatcataattatttctaatatgagaaagaaatcttagcctcaaataattgaaaaaatacctctttactctgagaattgattgtcctttttgattttgaactaattttaaatttacagaaaagtttccaaaatactacagagttcccttatgcccttaactcactttccctaaatgttaacatctcacataatcatagtacagttgtcaaaccaggaaattgacagtggtgcaataccattaaccaagccacagtgatttttcacattttaccagtttttccacaagtgcttgttttccactctgggatcacctccaaaattaaatagcatttagttgtcatctcagtatgtgataattcctcaatctctccctgtcttttgtgactttcacttttgaagagagctggtcagttgttttgtagaatggctcttcttttggatttgtctgatattttctcatgatgagagtgaggttatgcatttgtggcaagcacaccatggaaacaatgctgcttccttctcagtccacgatattggggggatgggggtgtgacattgatatgtcccattattggtgatgttaacctggatgacttggttaagctggtatcttacaggtttctgcactgtcagattacttttttccctttataaatactttggggaaaattccatgagaccacgcatacattctatttatctgagaaattatttttcctgcctttgaccttctccagggattccctctggtttttatctctttccttcaatctctgctgatgtcttctagttttccacaacctttggcacaagagaaaaggagaatgagatttctttttcctacttgggttttttggcatttggtttttgttttttattttttgttttaacagtcacccaagatatacctagaaaactaaactctgaaaacagaacagattatgttagttataattttcttggacattggttcatattgccgaaatttcagatcccaagatctaagttcatgacatgaaaccaatgtaatttgcttgaggagtaaatggtgggtaactaaaatgcctgccctggtatcaggcctcactatttgagaggtaccctcatttttattaaagttgtatttttcagaaaaatacaaatcaggcactgattattgagcatctgttattatgcatcatctgccttttgttttccccgtaggtttcactgtgtattattgaggcagaaatgtgcctgttgcttagaaaacattttgatctgtattttaagtgagtaagtgagtcacccacctcggagctcatgtggcaatattggtagtgattacagtaagttttgaggagctgtgattcttctagattctaaccacatcagctttggcctatttcttttttgtaaattaatttctcatatttaatgacattttaggctataatattgaaactgatggtagacagactctaataccaaggagcaaattgttgatgactttatagtactctccaagaataaggttatttgtatttacaagatatcttttcaaaaaatgtttcatgcatttttgtggatcggtgtatttagaaacacagttttggcttaaccaaaccaaaaatttttattaaggagatttcagatccaagcaccatagagtaaatttctttgctaaaaataatattacagttttctgattcaatcaatcatgagtgctacctttagaaatttttaaaaaattgataaaatatatctttacctcatgattgtttttactctcaaagataatgtgggatcaaaatgtaatttattataaacttggtaattattagaagtgtccctggtgtgacacttaaccccccaaacaggctattgagtgctcttggaggtctctcagcaaataaagccctgttttatcctaaacgtagatgagactggaaaagtctaatctgtagatttcttcctgagcctctgctgtcaaacgcagcactcctagcaggctcttcacacagagcatttccaagtactctaaagagtagaatcttagcaatacattaaaagttacttcaaaatcagacatcagatactttcttctggaaagccatatctgaggagagtttctcatcattaatattcaccatgatatcaaggttgcctggacttagtcttgctatgttgcccaggctgaagtgcagtagcacaatcttggcccaatgcaacctccgcctcccaggttcaagcaatcgtcctgcctcggcttcctgagtagctgagactacaggtacatgctgccatgccggctaattttttgtatttttaatagaaatggggtttcaccatgttggccaggctggtctcgaactcctgacctcaagtgatctgcctaccttggcttcccgaagtgctggaattacaagcgtgagccactgcacccagccttcctggacttttaactgcaactgagttgctaaaaagttagtgaaaggggaaactgtgacagtccttggagctttctcatgcaggatctatttttgaaacaaatgaaaggtttccccttactcttacctactcagctgaaaggaaagattgacctgggaaagggaagctttattcaagtgcttccagctttggctaatgactacctctcatatgctttccactcaaggatctttaaggtgatggtaaaaagatgaatgggggaacaagggaagacaagctaaagttgggaaaattctaaattacagaaattattttgcatagcccgaatataaagaaggttgatgcactagaaaggggaaaataaaatcttgattttcaaataaatattacaagtgcatgcccttatgccctcagatgagagtgttgaataaaacctctcattgcatttactgtgaaagatttgtctagaattaagtcacgggaatgtttcggcagtgctgcaaacttattgaataacagaagagagaagaaacttgctcagtgccagccattgagaagtgctagatttgatgcgagaccttgcatttttagagtaatgcttctctcacaggaacttggaattatattataaggaagcattctgacttgagctataataacctagagtatacatgctgaagatgaagctcaggacctgttcttgtttcagcagcgatgtggatattccaaaaggaagacataatcactgaaataagcagtaatagttgctgggcactcgcctagcatatatttcctactcacaatagaataagaagcaaaaattgccctgtggtgccaaggattgctattttctccttcactggcatatttaaaagacaaaaatctggctttataatgaaatggaagaatgaaaaattcacttcaagtctgaggacctattttccagttttcatcccaaataatattttattgaataagtgaaaaatagcttgagaaaaacaggaaccaaaatggaaactgacaacagccccttaatgatgaaataattgttaggtttgaagtgcctctttgtatagtggttgaattgagtaatcatgaaacagataatattttgtaaggtgtgaatctattactagaaagaccagtgttgcccaatgagccatgacatctcatatttgatgaatatattatcttcatcagaaagctttgtagcaaagacccatgggaatgggaaaatatctaatttctggcatgcatttgcaactttccattttcaggggaagtaattgtctcgaaatgaaaaaagaaacagaaatcaaaattcagacgctgacatcagatcacaaatctaaggtaagaaaatgcccatttttacagcagtgacttgcagaagacactttgtaattttttagaaggagtacctagtgtaaattagaaataacagtagcccagagctggtctagtagcctgcagctgatctgggatgtcaggggagcccagggttcatgtttgcctcagactcactggctttaagaagagccatttcatggaacatcttcttttgtcttgtctgttgaactatgctaacaatatttatgttgcctgcctcagaggcatcaaggaaaataataaatgaagatactaaaaggaaatattatataaaatacagaatatacttccctatagaaataacattaaacataggacagaaaaccgcccaaattgggaggtgatacttactccatcctaactttacatggaaatttggaatgagaaaaaattaagagctgatattctaaaagagaagcctaattactcacattttcttaaagacaggagaaaataggagcttgagagactttaatcaactttgtgggcatttggagaactaagtgttaagtcccagttaagaatgaaaacaattcttccagcaatgatagtttttaaatgaaaaggaaaaaaaaagaaaaaaaaaaccaacaacaactgttaaagaaagctcccaaaaatagctgtggttgaaccagccagcctcatctatctatatgcagctgtgtcatctggcctaatggccctgctgcatgcatggagcaggcaagatgttcaagatgttcttggtagctgtatgttttgtagggcatgaactctatagaggcagtaaggcatgtgtctttaagagttattccccactctctctcttcttaactggaatgtttgagaattagtagttgtgcaaactgtcatgattcttagatgcttggcatcaataagaaaagccttggcaacagtatcagtttgcttttgctatataatgaactgtgtcaaagaagagcacattgaaacaactactacagtttattaggtcacaattcagtgggtcagaaatttgggccatacttctgctgattttggctggagacacttgtgtatctactgtcagcagggggcgtatggccttacttatgtatctggtagttgtctggctgttgcttgttttcctacatgacctatcaacctccagcaggctagcacaggctcagtcagagggtagccacagggatcccagcatagcagaagggcaagtactttccagcctctgcttgcatcacatttgctactatctcattggctaaagcaagtcacaggtcacccagcttcaaggagctggagaaacagactccagctcttgacaagaggcactgcaaaaccccactgcaaagagcttggatattgggtggggaggactttctaccctagtgtctatcagggttgacacagtaagtcatgatccagaaataaaagaacacacagctctctattcagacatgtgggcttgtggacatgaagctggagaaacataaggtgataaagaaaatcctgatggaattggtaaaagagcctaaggcccacacaaatcagagtgttggctgagtgtggtggctcacgcctgtaatcccggcactctgggaggccgaggcaggtggatcacctgagatcgggagtttgagaccagcctggccaacatggtgaaaccctgtctctagtaaaaatacaaaaattagctgggcatggtggcacgcatctgtaatcccagctacttgggaagctgaggcaggagaatcgcttgaacccaggaggtggaggttgcagtgagctgagatcatgccactgcactccagcctgggcaacagaggcagactctatctaaaaaaacaaaacaaacaaacaaaaaacaaaacagagtgttgctaagtgaggcagtaaaataagggttcacagttaactattcagagccaaagcaattgatttattttgataagcaataacttcctgcttcccattgattaatacatattattttttggtggttataggtgtctcatgattcaccaattaagttggtgggaggaacctgaaatacctgaataatgttgtgcttttgggttcatacctgacctatgaggattacaatggcaccgtcccctttttcccaaacaggtcaaagagattgtagcacagcacacaaaggaatggtcagaaatgatcaatacccacagtgctgaggagcaagaaatccgagacctgcacctcagccagcagtgtgagctgctgaaaaagctactcatcaatgcccacgagcagcaaacccagcagctgaaactgtcccatgacaggtgggggaattgccgtctccagagtaaacatctaatatttaaaaacaaaagctgattttgtgtgtataagagagccaaggtaataagtgaaatcaatttgacgtacaacatgtagctcttttgtgtatctcatcatatggctgattatgagcaagatgagctataagaaatggcacccaggggccaggtgcagtggctcacacctgtaatcccagtgctttgagaggccaagacaggaggattacttgagcccaggacttcaagacatagcaagaccccatctctattttgaaaaaagaaatggcccctgccatcagagggcttacaggtgttggcaagatacaacacccatatgaacagttaagtcagataacaaagtagcatatgacacatattttaaaatgtcatgggcactaaaggcatccagctcagaggagctctaccttttcagagtggtcatggagacttttcaaaatggtagggctggaactggcctttggagaatgatctggagtctcttaggtagaaaagacacacagagagataaagaccaatcagttcagctcctagagtgaccaggttctgatcatttaatagctacctgtggagagagtctccatttcccttccttacagtgttaggacttctgtgaattttgaaaagataagcctgattaaaaaacagcaaagtatcagtttattttggcctgtgcccacttcagcaaagtgaatattgcatttgaaatactgcaagccatgagctggacttatccctgagcagaagaaggttggtgtttgttacatctttttatcatagctcggttgcagcttgcttggttctcacttagtgcctaccgtatgccacagttagggtctcttgagacacaacaagagtagaaaatagaagcattatacaaataaatcaaacaaaaaaatgtgtttaatgccaactgcataagttatctggctgcatgcccaaattcccaacattactttggagtgacagatactgccacaagaacaaagtgtttttgccctggtttcccattctcatttgaggcaactaaatgcagtctcccatgctccattttctgtgggataatgtgctgtacccccatgcattttaaagcattctatttcgtcctataggattagaagttgtcttttcttttttccttagaaatgctcttgattcactatgcagaaagttgtgttcatcattctgcctttgatgattgctacaatgccagattttaggtgcctacccttattcaaagatacttcacggaatacagcatggcacttgtctaatcttcttttacattgttgaataaagagaaaaacattagctcacaacagtaggcattatctgaaaggaaaaaacaaaatatactaattcttgaattgcttaggaagtcatttgaagagatcatgacctagttactaaaatactttaaaaaataaatccatgggcttcattccaagatggctgaataagaacaggtccagtctgcagctcctagcatgatcgatgcagaagatgggtgatttctgcatttccaactgaggtacctggttcatctcattggaactggttggacagtgggtgcagcccaagaagtgtgagccaaagcagggtggggtgtcacctcacccaggaagcacaaggggtcaggggacttccctttcctagccaaaggaagccgtgacagactgtctctggaaaaacaggacacttctgcccaaatactgtgcttttcccaaggtcttagcaaccggcagacaaggcgattctctcctgtgcctggcttggcaggttccacgcccatgtagccaggctcactgctagtgcagcagtcagatcgaaccgtgaggcagcaacctggctggggtaggagcgtccaccattgctgaggcttgagtaggtaaacaaagtggccaggaagctcaaattgggtggagcccactgcagctcagcaaggcctactgcctctatagacaccatctctgtgggcagggcatagctgaacaaaaggcagcagacaacttctgcagacttaaacatccctgtctgacagctctgaagagagcagtggttctcccagcatggcgtttgagctctgagaacggacagactgcctcctcaagtgggtccctgacccccatgtagcctaactgggagacaccaccaagcaggggccgacagacacctcatataggtgggtgcccctctgggacaaagctgccacaggaaggatcaggcagcaatatttgctgttctgcagcctccgctggtgatacccaggcaaacagggtctggagtggacctccagcaaactccaacagacctgcagctgagggacctgactagtagaaggaaaactaacaaacagaaaggaatagcatcatcatcaacaaaaagttcatctacaccaaaaccccatctgtaggtcaccaacatcaaagacaaaaggtagataaaaccgcaaagatggggagaaaccagagcagaaatgttgaaaattctaaaaaccagagcacctcttctcctccaaaggatcgcagctccttgccagcaatggaacaaagctggatggagaaggactttgacaagttgacagaagtgggcttcaaaaggtcagtaataacaaacttctctgagctaaaggagcatgttcaaacccatcgcaaggaagctaaaaaccttgaaaaaaggctagatgaatggataactataataaacagtgtagagaagaccttaaatgacctgacggagctgaaaaccatggcacgagagcttcgtgacacatgcacaagcttcaatagctgattcgatcaagtggaagaaagggtatcagtgattgaagatcaaattaatgaaataaagcaagaagaaaagattagagaagaaagagtaaaaagaaaggaacaaagcctccaagaaatatgggactatgtgaaaagaccaaatctgtgtttgattggtgtacccaaaagtgatggggagaatggaaccaagttggaaaacactctttaggatatcatccagtagaacttccccaacttagcaaggcatgccaacattcaaattcaagaaagacagagaacaccgcaaagatactcctcgagaagagcaaccctaagacacataattgtcagattcaccaaggttgaaatgatggaaaaaatgttaagggcagccagagagaaaggtcgggttacccacaaaggaaagtctatcagactaacagcggacctctcggcagaaaccctacaagccagaagaaagtaggggccaatattcaacattcttaaagaaaggattttcaacccagaatttcatatccagccaaactaagcttcataagtgaaggagaaataaaatcctttacaggcaagcaaatgctgaaagattttgtcaccgccaggcctgccttataagagctcctgaaggaagcattaaacatggaaagaaacaaccggtaccagccactgcaaaaacatgccaaattgtaaagaccaacgaggctaggaagaaactgcatcaattaatgggcaaaataaccagttaacatcataatgacaggatcaaattcacatataacaatattaaccttaaatgtaaataggctaaatgccccaattaaaagacacagactggcaaactggattaagagtcaagacccatcagtgtgctgaattcaggaaacccatctcacatgcagagacacacacaggctcaaaataaagggatggaggaagatctaccaagcaaatggaaagcaaaaaaaaaaaaaaaaaaaaagcaggggttgcaatcctagtctctaataaaacagactttaaaccaacaaagatcaaaagagacaaagaaggccattacataatggtaaagggatcaattcaacaagaagagttaactatcctaaatatatatgcacccaatacaggagcatgcagattcataaagcaagtccttagagacctacaaagagacttagactcccacataataataatgggagactttaacaccccactgtcaatattagacagatcaatgagacagaaggttaataagatatccaggacttgaactcggctcttcaccaagcagacctaatagacatctacaggactctccaccccaaatcaacagaatatacattcttctcagcaccacatcacacttattctaaaattgacaacataattggaagtaaagcactcctcagcaaatgtaaaggaacagaaatcacaacaaactatctctcaggccacagtgcaatcaaattagaactcaggattaagaaactcactcaaaactgcaaaactacatggaaacagaacaacctgctcctgaatgactactgggtaaataatggaatgaaggcagaaataaagatgttctttgaaaccaatgagaacaaagacacaacataccagaatctctgggacacatttaaagcagtgtgtagagggaaatttatagcactaaatgcccacaagagaaagcaggaaagatataaaattgacaccctaacgtcacaattaaaagaactagagacgcaagagcaaacaaattccaaagctagcagaaggcaagaaataactaagatcagagcagaactgaaagagatagcgacacaaaaaacccttcaaaaaaatcaatgaatccgggagctggttttttgaaaagatcaacaaaattgatagactgctagcaagactaataaagaagaaaagagagaagaataaaaaagatgcaataaaaaaatgataaaagagatatcaccaccgatcccacagaaatacaaactaccatcagagaatactataaacacctctatgcaaataaactagaaaatctagaagaaatggataaattcctggacacatacaccctcccgagactaaacctggaagaagttgaatctctgaatagaccaataacaggctctaaagttgaggcaataattaatagcctaccaatcaaaaaaagtccaggaccagacagattcacagccgaattctaccagagatacaaagaggagctgataccattccttctgaaactattccaatcaacagaaaaagagggaatcctccctaactcattctatgaggccagcatcatcctgataccaaagcctggcagaggcacaacaaaaaaagagaattttagaccaatatccctgatgaacatccatgcaaaaatcctcaataagataaatactggcaaaccaaatccagcagcacatcagaaagcttaaccaccatgatcatgtcggcttcatccctgggatgcaagtctggttcaacatatgcaaatcaataaatgtaatccatcacgtaaacagaaccaataacaaaaaccacatgattatctcaatagatgcagaaaaggccaacaaaattcaacaggccttcatgctaaaaactctcaataaactagatattgatggaatgtatctcaaattaataagagctatttatgacaaacccacagccaatgtcatactgaatgggcaaaaactggaagcattccctctgaaaactggcacaagacaaggatgccctctgtcaccactcctattcaacatagtgttggaagttctggccagggcaatcaggcaagagaaagaaataaagggtattcatttaggaaaagaggaagtcaaattgtccctgtttgcacatcacatgatagtatatttagaaaaccccttcatctcagccccaaatctcctcaagctgataagcaacttcagcaaagtctcaggatacaaaatcaatgtgcaaaaatcacaagcgttcctatacaccaatgacagacaaccagagagccaaatcatgagtgagcttccatttgcatttgctacaaagagaataaaatacctaggaatccaacttacaagagatgtgagggacctcttcaaggagagctacaaaccactgctcaatgaaataaaagaggacagaaatgaatggaagaacattccatgctcatggataggaagaatcagtatcgtgaaaatgcccatactgcccaaggtaatttatagattcaatgccatccccatcaagctaccaatgactttcttcacagaattggaaaaaactattttaaagttcatatggaaccaaaaaagagccctcattgccaagacaatcctaagcaaaaagaacaaagctggaggcatcatgctacccaactttaaactatactacaaggctacagtaaccaaaccagcatggtactagtacgaaaacagagatatagaccaatggaacagaacagagcccttagaaataacaccacacatctacaaccatctgatctttgacaaacctgacaaaaacaaaaaatggggagaggattccctatttaataaatggtgctgggaaaactgtctaaccatatgtagaaagctgaaactggatcccttccttacaccttatacaaaaattaattcaagatggattaaagacttaaatgtcagacctaaaaccataaaagccctagaagaaaacctaggcaataccattcaggacataggcatgggcaaggacttcatgactaaaacaaaaagcaatggccaccaaagccaaaacagacaaatgggatctaattaaactaaagagcttctgcatggcaaaagaaactaccattagagtgaacaggcaactcacagaatgggagaaaatttttgcagtctacccatctgacaaagggctaatatccagaatctacaaagaactcaaacaaatttacaagaaaaaaacaaccccatcaaaaagtaggcaaaggatatgaacagacacttctcaaaaggagacatttatgcagccaacagacacatgaaaaaatgctcatcatcactggtcatcagagaaatgcaaatcaaaaccacaagagttgccatctcacgccagttagaatggcgatcattaaaaagtcaggaaacaacagatgctggagaggacgtggagaaataggaacgcttttacactgttggtgggagtgtaaatttgttcaacgattgtggaagacagtgtggcgattcctcaaggatctagaactagaaatcccatttgacccagcaatcccattactgggtatatacccagagaattataaaccatgctactataaagacacatgcacacatgtgtttattgtggcactattgacaatagcaaagacttggaaccaacccaaatgtccatcagtgatagactggattaaaaaaatgtggcacatatacaacatggaatactatgcagccataaaaaaggatgagttcatgtcctttgcagagacatggatgaagctggaaaccatcattctcagcaaactatcacaaggacagaaaaccaaacaccgtatgttcttactcataggtgggaattgaacagtgagaacacttggacacagggtagggaacgtcacacaccgggccttttggagggtgggggactgggggagggatagcattaggagaaatgtctaatgtaaatgacgagttgatgggtgcagcaaaccaacatggcacatgtatacctatgtatcaatcctgcacgttgtgcacatgcaccctagaacttaaagtataataaaaaataaataaataaataaaataaatccatggcagaagcacttttcaaagcaacagcagtattttagctttttctcaaacccctggtggttgtgtttcttcctcatgatcacaactattattcttggttaaaaatctttgctttcttgacatttgtcagcaacgtttggtcattggtgtttgttgaatgaatgaatacagaaaggtcaatttcctaacaagttatggtaaaatctgagagtgatcttcttgtgtccagagtttctatacatgttcctgctggagtggctctagggtagctgagtgagcaactctccagttcagtattgcccatctctttggatgcagagcaaatagcagtgcctaggtaacctgactgcttgtatgctggtttccaggcagtgctttcaatagatctccataggttatagaaaaaaatttttgtaataatatactatgtagcattttaagttttattcctttaatgcatgtgtgtcatgcatacacatgcattcccacatgcagtggttggtcacctgcaaacctacttttttgctattccctgtgcttacttgaaaccatttagtccctttcattcctgtggctgatagaaacaggaaggccgtttgtgatggttagaacattttctctctctcttccagcccatctgatcccaaataatatgaagcaaaactgagatctttatatttatgggcaaaaatactgtctcctcatcacaggccatcactgtcacttcaccactaggtggccactgcccctcaaggatcagcatccacatagcttggggtcccgtccctcctttttccaaaatacagaagtcgatgagctcaataatagaaagaaaaaaaaagaagagtgagaggagtgagcctagtcatattgctataaacagaagtatttttgtttttttccatgcttaaattatgtctatatatataaaatgtaaactttactgttgtaaccattaagtgcatgacattaagtacattcactttgttgtgtacccgtcactgccacccacctctagaactttctcattttccccaggtgaatctctctacccattaaacacaaactctccatcccccctccctgtttgttttcttgtttttaatacatagggaaagcaaggaaatgcgagcacaccaggctaagatttctatggaaaatagcaaagccatcagccaagataaatctatcaagaataaagcagaacgggaaaggtaagtctgagagtgttcactgcaggaatatggcattgacttgaggacacagtctcaactttctttatgtgtgtacacacacacacaactgagacagcaaaacacttgtggcttttgactaggaattctgctattataactgcaatggagatttgttattatcactgtagaacaatcgtccacattttctggttgcttactaccaccagtaaaattagtttacattcaatatatatgtgctgctttacaaacaaagttgcataaaatatgacataataatataattcttttttttattttattcatttttttttttgcttgtttgttttgagatggagtcttgctttattacccatgctagagtgcagtggcacaatctcagctcactgcaacctctgcctgggtttgagcgattctcctgcctgagcctccctagtagctgggattacaggcatgcaccaccacacctggctaatttttgtatttttaggagagatggggtttcaccatgttggccacactggtcttgaactcctgacctcaagtgatctgcccgcctcagcctcccaaagtgctgggattataggcgtgagccactgcgcccagcctataatcaatataattctgaagcatccttcccaggttccactgggtcattctgcaagcctctcccctgctcaggtgtcagtccgttctggatgggccagttctgaatagcagcaacagtcaggagggcggtcttcttcagtagtccttcacatgggatcatcttgaaagcccccatcccatttgtctcatttgtccttatgttaggtgagttttctggaagcagatcaaggcaggaattgatgtgcttgtgattcactgaggaagggaccttcagagaaagggagtgagaaagcaggaaggcccagggcaggccctaagcaaggatgtggtctcacctagggtcccagtaacctcaaataaaaaattccaccacagatttgtccctctttgaagcaagagtacctggcttttgtgtttccatattaggcagtcattggccgcctgagactggggggaaggtttgtgtgtcctctatagaaggtgccaagtgcaagccctttagacacagctggtgaaggggatctgaggagctgtcaatagtcatgttacccaagggataggcacttaattcccagcgatcaccagtgctgcccatcatccacctcaaggaacatctgagaatacaaatgctatcagctccataaccaagagcctggattacgccaccagcagttagggacagtggggttccttcttttgggggaataatacctagcaagaaggtggccttttggccaaagtccaacagagaaaagctgttttatgagccaggtgcagtggctcacacctgtaatcccagcactttgggaggccgaggtgggcagattacctgaggtcaggagtttgggaccagcttgaccaacatggtgaaacctcacctctactaaaaatacaaaaaaattagctgggtgtggtggtacctgcctgtaatcccagctactcaggaggctgaggcaggagaattgcttgaaccccaggggcggaggttgcagtgagccgagatcctgccattgcactccagcctggccaacagagcaaaactccatctcaaaaaaaaaaagaaaagaaaaaatgtcattctctggatgttattctcagataagcaactttgtttaagggccttatatacatggaaatgacaccttcttcagtttgaaaacaccaaatattccagccatgataaaacctcatgaatttgaactgttttagactatccaaagtgaaatatagaattaaccatgacaaatgtgccaattaatagctttttaccatctttttcaaatatgttacaaagtagactttagctcggttgaggtcaaattatcttcaatttggagttactgctaacttaattagcaagggtcttaaaaatttatcttattttgaaaactgtacttatttgttgtaactttctatttttatttgtgcaactgtatgggggtacgtgagaaaactttacatgtatacaatgcccagtgatcaagtcagggcatttaggttgtccatcacccaagtactatacatttgtggctaagtatagtcaccctactctgctatctcttataagtttgtatccagtggtatgtggttccaaaatatctacaaattggctgttttttaaaaaataatttttctataccaaatgatagttatattctaaacccatactgtgtgtatgtttgtatccactttatcaaactgaggagaaataaaatttaaaaatttgtcatagcactaagaaagatacatagaaactgaaaatcatacttacatttttagatcaaagaagacattttaacagaaattacccaatatttataactgaatgacaatgtaaacactatttatcaatgtgtagagggtagttaaagtgatatttggagggaaaaatatagcctagatgcatatattttttaaaagatgtgaaaattaatgagctaaccactcaaagagaatatgaagttggaaaaacagagtgaacccaaagatctctgatggaaagaaataaatttaaaaagcaaaaaatactgaaatagaaaacaaaatgcaatagagaacattcagaaaaacaaaagcttatttgaaaagaataataaatcagttaactttcaccaagactaaagaagagagagaaagcacgaattagtgatgttaggaatgaaaaggggaattaactacagagaaaaacgctttgaaaaactaagtctactattaaaaaaaactaccaataaatttgaaacgttagatggagtggagaattgctttgaaaaatataaatatccaaaactgactgaaaatggagaaaacctgaacagactggcaattattacagaagttcaagaagttataggtcttttcactcatgaaaaacactctacctcaccagtagtcagggaaatgcaagttaagacaataagctccattccataggagcatccaactgacagaaagtctgatagtactaagagtgggcaaagatatggggaaagggtaacacccagacactgcagatggaaatgcagttggggacaactggattggagtaaggaagagcctgttcgtaccctgccaagtgacaagtctgagtatacaccctacagcagcctttgcctgtgtgcacaagaagatatgcaccatacttcatccactcatctgtttattcaacagacacttattgtgtcaggtattacagggcccacgcacccgatcgttgtagcgttgtttgaaaataacctaatttttgttaatggcaatgaggaaatagtgtagtctgttcataaattgaaaagtccatacagcaaatgaaaataatgaagtggtctggaacataggtgtatctctaaaacataagactaagtggtaagctatgggaagaaacccagactatgttactctatgggtacatttagaaaacacaggaagcgatgccactgtgcctggccagcaacatcagcatcacctgggagcttactagaaattcagacctcccaccccaggcccactggatcaaagtcactaaggggaaggcacaacagtctgtggtttttatcatctctccaggtgattggtatgcacaggaaagtttgagaagctcttatattacacatgggcacatctgtatgtggtttaaaatattaaaacatgggtgagaagatccacaccaaattcacaatagtggtaacctctggggagagaggaataaggaaaactgaatcaggaagaatacacatggggctttaattacatctggaactgtttattgcctttaaaaatgtgagataaacatggcaaaacattaaaaatatcagttaatctgagggacacatacacagatttttaaatattcttctctggacattatatgtttgaaaatactgcaataacaattagaaaaataaagcaataattccatccagagaatttgatggaatatagctctttattatttgatataatattaatttcattcaatgtcataccaaccgttatttgtgcccattgcttttaggcgagtcagggagttaaacagcagcaacactaaaaagtttctggaagaaagaaagagagtaagtattttattatatttttggcattcttcctttaaaaaactataaacaataacatgcttagccaccagatctctagctaatttgtttaatttgatttttctgtacattaaacattccagcttctctgctccctgaaagctaaaataatgtctcactaaaatctttaaggtaatgatttggcaccattttatacagaaaatgaagccaggtttagtcatgcgtaagtcctctattattttctaagattttagcaggaaagatcttcccagaaataattatgagtttaaactctccaaattttgagatgattttttaaaaaattattatctctttcacttaaattataaagttacaagtcatctctcatccctgttttaagattgtaacccaaagttcaatcagaattttttttttttttttttttgcagcttgccatgaagcagtccaaagaaatggatcagttgaaaaaagtccagcttgaacatctagaattcctagagaaacagaatgagcaggtattttacctaaaatacgtaaaaacatgcaggcagctagccagctttgggatacacatgccatggcccacagtgaccagtggcttgcatattgtaattgaaaggtagatagaagaatttgttgcccattactatattttctccattatatccaaaaagaaaagaaagtaccagtttttggagcaggagcagaatctggctgtgccaaaaaaagaatatttggataaattatggggattatgtgaattctaagaatgaaattactaaaagtgagaggatgaaaaaaagagattacgaagtatttctccattttcatttagagttttataatttgcaaactataggcaagggatatgatgtttaaaagcaaatgagagaaaccacctattttcaaactcaatctgaaaacgaagtttaaaaacctccctgggacttacaggtggtatctaaagtcatgagcccccatcactctacaaatcactgagcatgagtggataccatagtcttggtctttttccctgcaagacaagacactaaataaagaaatatacacaaataaagagttatccaggccgggcgcagtgggctcatgcctgtaatcccagcactttgagaggccgaggagggtggatcaggaggtcaggagatcgagaccatcctggccaacatggtgaagccccgtctctactaaaaatacaaaaattagccgggcctggtggcatgcacctgtagtcccagctactcagttggctgaagcaggaaaatcacttgaacccaagaggcggaggttgcagtgagccgagatcgcaccactgcactccagcctgagcgacagagtgactccatctcaaaaaaaaaaaaaaaggagttacccaaacaccaactgtttagttaggccaatgggcatataccagcaccaaggtaaatgtatttttatctggtgcatagtacaggtgggcacctttccaaatgggctacagcccatcagccttctacagtaacctttaattaatggaaatccctctagttcctatggcaacaagaccctcagttatcatttacatttcagactctctcagttcaaatgttattctttaggtgtagttggtatagaagttattattcctaggtaattcaatttagaaacggagaggttttgatgaaatatgtacttgtgccacattattccttcctgttttctcccatctataaaacaatcctatttaaggaatacttttttccagagtaaatgactccccttgaagaatacttaagtaggaattatactaaaaagtacctttgagaaagtaaaaataaaataaaataaaataaaataaaatcttttttgtatggcaattgggtaacagataaatctgacttctagtttcagattctttactttttggtggacagaaattttattcatcaacatacttcctagttatgtttcccatttccttttcagctaagtgcttctattcataagcaagtccactccaaggggacaatacatggttattgtcccacaggtacaattcatttgaccaactcataaacacatcacattctggtacaagttacctagcttatgtttttgctcttaaagcacttctcagaaagtgctcctgggggaaatatgggaatatgagtaaggataaagtcaccatctccaaagctttagaagccacttcagtgattcaacaatgggtagggataaggatgccttggagaaggtttttaaaaattctccctagaggaagggcacagtgaaaggtaaggcacagttatgtgttagttaactaaattaagaaactacttggaaattaattgtgttgcttagcaacaagtttgactaaagaatgtaaatgtgctcagaattactcatcactacaatagtggtgtatgccagagctagagaaaacagtcatcttgtgtcgctagctttggagccgaagtacataatttttaaaaatcagtttgagcttttatcctaacacatggctaattcaagccacaccagagttcttgcattaaactgctagattagtgatagctgtattgattagattgtattgggagggtgctggctttttgttgcagaaattcaaatatgtcttttaaggtctaccacccacaactgacactttgagtcacaaaagcttgggaaagcatagaacatgaaaaggcttgagacctgataaagatttaatgagattcaaggaaaagacattcaagatatcatactgatgcttctggcaagcaaagaatttggacttgagtttctgtgttaagctttgctttagaaatatggcctgttcaattgcaaattcaatcccagatctttctagtatacattttttggcatttaagggtgagaaagctctcaattcacagttactctgtatggtacaacactgtcatgggcacagtgcaaaagatacagtgacttcatttctttcctcataaaaaggcaaggtctggaactatatagtataactgccttcataaccaggtaaacatttcatcagcaagaacagttctttgtctccagacaatgcaaacttctacaacaatcttctaaataattgttaaatcccaagacattttttctaagccagagataaatgtaaacattctcccatagtatttccctcaaaggtttctttctgttctcctgtgaccctactcctaatcggtgtcccaaatctccccttccaaagcaaggcctggaatggattcagtccattagctaaaccagtgttgggggcactggcagaaacaaaccaggcgtcagtatgttttggtcctgattctggatcctcaccttctaggttatttgtaagccactttatgtccttgcctacttggtcagccaactattcacttaacactctgaaggttggggatgtttttcctacttgagttttttcatagacttcccagctacacagtatatctcatctgtcttgacatgtaccatttcaaacattaacgactccattactgtcacacactcgagtctcaaaaattgatttttatcatcaatcctatcatttaataaagagaggtaaaaggttttgcttaaaggccaggttctccacttactgccacagaagagaggcacagtctgggaatgacaggcgttggttgtttgtttcgtttcttttttttctgttgagatcaactaggggaaagtttgtcactgaggggtgtgtacatgttttatccttagctttttgcttttctgtatatggttttgcattcatttttcaaattcacttcaatattcatttattttcttcgttttgtatgtatgactcaattttgacattactatttttgtacaaacagcttttgaaatcctgtcatgcagtgtcccaaacgcaaggtaggaccgaaactctgataagcaagacgttgctttccttctcgactacgtccgtattctctgtgcagtctccatttatgagtcacatctggtcataactaatatctgaagggtttggatttaaaagcttgactattccatgcttggatttctgatgtcatattcatgccaaaatgccctaagtctttagagaattacttctgagggtatttgaacctgtattttctattgcagatttaggaaacagatcatggtaataaagacataaccagaacagtgatgtgcagctgtcatttggactgaccagagctaagacagggtcacagagtcaggtcactcacaaatgttaatatgactccaattaatttttaaagcgctcgctgaaagttggttggtggtttttaatgatggagctgtgctgtgcatgtagaaaccttacacgatgactcttgtcatgctctctgctaagtcccatctgccaaagaccctaatcactcctcataagtaaggtggtcatataatttattgtccataccaggatagttttgagagtgaaaggcagctctgtttataatatctaggactacaggcataaactggaattgcctcagacaaatgagaatgaatggtcacccaactcatataagaacttagctgttggaatagtcttgtaatgtcctatgattcttccttctacaccgtggtcaatactttcttcagaagctaaagggggacaagcacagagaatcatttgctactatttaccgaacttggaagtatttaatttccagtgctgataatgtttcactgtcatcccttttgaatactgtttgtgtcatagtttcatgtttgtatatttttctccatttcttcatttctctattagagtattactatactttaggcataaaaaatatctgggcagagggaaccaaccatcccaaatttacacagaaagatttaattctttggtgttattatatccatcctcaccaaaatgaagcttaacgccaaaatatagaagtaagaagaagaaggaaatcacagtatagtctgtgggttaaattaattttgtcacaagaattcatttggaagatgcttctcatatatctacagagttgaccaaatcccctcccagtgaccttccatttagttggaatatctaagcagacataaatagtaacatcagggcacttcagaatcttcatccgatttatatcttcataggtccatgtttctattttcaaatgtcctttatttcaaagcagcatgtcactaaaaaaaagaaatgggcaatcatcattcctcaaaagatacgtgcatttggttgggcaaaatcatccaggctaccagttggataataaaagtcgaaatgtactatttgattttttcctatgtttccaagcaagtatttctcaccagacactgcccccatcatatcccctttcctcttctcgaattagctggttttcttagtgacaatctgaactcatgaggttgaattcaccattgcttacttcctggtagtccataaaaagtaccctagagaagtaagagcccacagggatagagtttgcacaataagattcctgaaagcctgcatgttcctgtaacattccatttacagaagactccagccaatccaatgtaatatgctctcacctgaacttctctatcaattagatttttagggaattacttttaactaaatttcaggctatttaggaaataagttgtacataagcaatacttattctaatgtgataaaattatctacacacagtcaaagcaacgtgtcaatctgtagaaactaaatcaaacagtttgtggtatggtctaaagataaagcaagtggtctaccctcttctcaagtggttctcctggcactgtgtaaaccagtccccaaaatttaatgtgtataaaaacttcctggagatcttgttaaaatgaagattttaactgattcaatagatctggggtagactccaagattctacgtttctaagaaggtcccaggcaatgctgatgctgcttgtacatggaccatattttgagtagcaaggatgtggtgacaggatcatatttatgggagaagagaggccagggttgttaagtgccttcagataaggatttcaacacacgtaaggccatgtttctgatgttataggcgaaggagatgcagcagatggtgaaattggaagccgagatggaccgcagaccagcaacagtagtatgaaactccaaaatgcaaactgaagcagcaaacccacaaagcatcaaaagactcactcacaaacttctgaacacaaactccatggatgaaagctgtttattttgtttcctttatgtgtaaacaagatgatatctgaaaccagagagacttggaatgtctgactgacttctatttaacagcttgagtattgcatttccttggccaaacaaaaatagctacaaatccacaaaaatttactattccagtaaggcagagtccaaccattgataatacaacttaaacatgtttgctataaaataccatcacaagtaaatgagcttggtgtgaacaactctcctttgtgatgccttaggacatgtttgaactgcagcaaaaaacaaaaacaaaaaacagtgcattagcaatttcatagcaagtgcatgcactaggaaaagaaaactctgtctacaagtttattagcagaagtggtggtctgctagacaaataattttgcaaaatttttctacatctaagttacctcatcagtaagtgccatgtctctaccatgccatcagaggctaatttcctgtaaaagttgtggaaattgttagaacaatagaaaaatagagcagtgtatgtgtgccaaaactcatcattactcaaaggagaactgtgttaggcacatttaagaaagtttacatctgacattgctttataggaattgtttctgcagattccggatattataattcacaccataaagattgtgaagtggttattggcaaacgtttgtaaatgtgaccatgtataaagtatttatactctttaattcacactgttagagagcaaaatcatctaagtattgccacatgacaagattagtaaacaggaatactagaactatgtttgcatgatacacaagcaccaataaagactaatccatacacagttaacctaatgccaaataaatactggttaaataaatgtatggcacagaatataatttgactatcaagacttttagcataatgaaaaaccctctctctatatatatatgtgtatatgaattatgtgggcattcttgatacttcaagttctagtttgaaaaaaatacataactaatttaattttacacaaaaatatttatgcagattttcagaatttcatatcaggaaatgacctttttatgtctgttaaatatcaaaacaatttgctacagtgttaatctgcatggtctttaagcctgctgtagttgagttgcagacagtgcatgaaaaagtattccgctgggaattgagccatgccaccaaagccaagaggagcgcatggaaacccggtagtctagaactaatcagattactgattttagggcacagcaccagatgaattgttgtatatgcttgtaaaaattgattctgtgtgttcctctgaacaaagcggagaaaatgatgataccatcaatattgaaattaaacttccaacttctctaataaaaaattaaaacacgcataacactcgtcaagagtatttgctcccaagacacattctagcaaatgttttgcctttttcatatacatgatatcatcgttattttcaaagggggcttattaataccctcagcatgtttttcacccaaatgatgcaaaacatgcagattctagttgacttcagttgtaatagacttgtttttctcctatttatgatttgaagtggattctgtaaaatatctcttgttcttagtttccttatctgtaaaacagtggagttagactacatatcttttggcactaacatctcatgaaaaattatggttaataaaatatcaccacatttggattgccaattttcaaagattctgagtggcttctcatcatcaaatcaaatcaaatccaagagctcaactatgctcaccattctgtaacacttgactgaattcatcacttgcctcctcttgtttctgctttggagaggtactactagtttttccatttttcttatttcttccctcttttcatcctcctaggccaccataagcatttatattttccagtgttatacatggaaccagtttgtttttctttgatccaggttacttttagtatttgagacatcataccattaatccattgtagtaggattaaaatgtacacacaactcaaatgtgcaacaaaagcatgtgttacctgctattgtcagttcatattgcactcaaaccttgcattatcccttattatgaagaaaaattaatagccaattaaagtaactcagtgtcttccagttttgttttttttttttaaaaaaaaaaaaacattttcagggacatgtttagttacttgagagtcaaatcccctgttagagatccctccccattcaggagatcttgcttttttccccagatggcatctgggtatgagggaagctcacgtgtccacctggcaattggtaggagcatctggtttccccattgttggacaggtcctaactgcactctactgcagctttgcaaagtgggccttcccaccccagtggttcaaagtccctgctcagccaagtcctcattctggtatcagtttattccagcattcttctgggatatgcagaacttccaggtctttgggggctgtgcaggaaccaaagatgctgtctcaggtccatccatcaaaacactcctttggtcatttgtcagctactagggccatgtagtttcaataccacagagttttctaaatccaggaggcttgaaatgttccagagcaatgccccaaaaagcaagaagcaagcaagctttatactgccccaagactatctgggtttctacaacatcttgcttctcccaccatcagaactttttgttcttatttgggagccagggcacttgagtctcaattcttacctttattctttctttcagcccagaaaagatactcaactcccattcctgactgatggaatacccatacagtactatacttctcttttcctaagtaggttgctcttcacattttgggggaataaaaggcttcatggaaaaagagccaggttaccaagatagggaaacacatcagaaagtaccatctttcatcaaattgaaggcattattgattatagcttatactattattttatataccacacaaaatgaaacacactgccaattaaactataataccctatccggtgattgtcaaggcacatcccaatttcagagatgttaaaatgtgaaaaatacatacatcttggaatccatgaaatatgtagtattccaaaagtagtatacaaactcctcaaccctaagccttaaagaggagaggaaattttaaagataggacacaagagaatcattttatcacaaaactgaaactggttttgtggaactgaaaaatggttccaaaaaggaaccattctgcaactgagtttcaaatttagcaatgagcttcctggaaagcaattcaaaaaggggaagaaatctatctttcaccgtctttatttgaagaatcttgtttcctttagctgtttctttcaatcacatgcctttgatttctacttctttgcatgtaattctcgaatctataattctagcctttacctttctttcccgaagctctgactctccctctcagattgtcaatagttaaataggcggccatgtgcacattgtatgtgattaattaaaaaaaatagagactctttctccatctgtcctccccacatattttaatagtccataagcagtgctaaaccttgtggccatctttttctgctccatctcatttcctccagcacccaatctgttcataaaacttatgaattctgtcctgtcttggaaactttcttctccttccttataactcaacgttcagaattttaaacttgctgttcaatttctttgccctccaaatcccttttacacagagattaatcttcccaaatgacacctgcaatcatattaccattctgcttgtaaatgcagaattcctgtctactgcctaaagaataatgttgaaattagtgataacagcattcattttctgcccccaacatgcctactcattttagtcaatatgaatttatcactagtctctgttcacatacacatagtacacatcttttctagccacattacataataatgttctattaagtcttgaaaagcaacttccaaaaatgccatttctgaaaagttctctcattctcccaagcaagaagtaacctgccctttttcatttatccatttatactttaaaagctatttaagcataagacttttccaccagtcctgactaatttcttttcaggctttgttcagttgctcttcaaagaagaggtagtcactagatatcgaattactaagttattttctatgaagtaaaataaccatctgtatagactcttgggcaggaaatgcctttgaaaacttaatgaaaacctaaaagaagcttttttgcaaagtgtcttttcagttccaagaaaaataatttttctcaatacttattgttagcatacttttaaaacagtgcaatgatcacagtggccatcacggatctaacagtgtggatccatcaacattaagagattatggagagtgaagaaggaatacccctattattttattgctgaggttatcttagggacgcctcgttcaaaactctagcttctccttcttcatcacttgtgcaaatctaacagaaggccacacatttctacaactcttctttgatgcttgacgttgaacggaatctcaagcacatattttaattgcatctttaatatcataataaatctggtgatacctctgggatgaatatttatgagccatcttctttaataatattttgtggaaaacgttctgctccataggttagaataatgaaaaaatattaggcgggtggggggagtagggagatggttaaaatagcagcatcattgcttttacattaaaaaattggtgtctacactgtacttatcgtgataaatgatgctgtgccttttccactcctttcctctcctagcattaccttcttggaagttcagggtaaggggcaatttctgaagtacttcatcctggaaatttttgagtgtccagcacaataaaattaggaaaaatttccaaggaaggccaatttaatattgtatacctaatcacttgcatcaggactcaatagctttagatgaatcagaatgtaccaaaaacaaaacagacagaaaaaggatttgaccatctgtcatttcggaactttgatatcatataatgtgaatgaggaaatgttatactgatccatcaaaattgtttacccttttcaagcaattcatggattttctcaaaattcacatgcagcttttaacacttctatcttttgtttttccttagacaaatcttggtattttgttagggtgtggtatttgttacagcacagcatattgaaccctacagactgtacccctgtattatgaattcacttctactacatcaagtagccatataaatggttatattagacatttcttcagcattgaactaactttatttgttcatggattaaatatttattggaaaaccactcttaacctctctacccttgtaacccagttccaactcattctgctcaccacacaacagccagtaagtagagagacaaggagttggaacaaggaaggtgactttagttcaaagagccagaaaactgagaagatggtggactagcgtcctaaagtaccatctttggtcagtactcatttcagactctttatgttaagggtggtgggaagaggaggagttgggatcaagaggtgactgacaactgcagacatttgagtgccaacaagggtctgaggaggttggaaacttctttgtctttgtctttagccaagtcacaatgttcctataaatctttaacaaaacatagttgcttacatactctctctttaatcccagagtacaaatacaaaatggctatttttgtattttatctgtgtgcccaaattagcctagcctatgtgcaggaacaggaaaaggccccttaaacaaaaatggggtcagttatgttcttttagtgtttcactgttacacacttccaactttttctcttttcttttttttttttttgagacagagtgactctgtcgcccaggctggagtgcagtggcactgtgtcggctcactgcaacctccgtctcctgggttcaagtgatcctcctgcctcaacctcctgagtagctaggattacaggcacgcaccaccatgcctggctaatttttgtatttttagtggagatggggtttcaccatgttgaccaggctggtctcaaactcctgacctcaggcaatctgcctgcctcggcctcccaaagtactgggattacaggcatgagccaccgtatccagcccttcaacttgtttttttaccagtaatgcactctattttgaaaacttatcaacagttttagctttaggcgatattcataaggtagatgggtggcattaatggccccaattttttatgcacaaaattatttagaacagtgtataaaattaccctgaggctatgtgtatacagtgtaatgacacataaatatattttgtgtttggacttggatcccatccccaagatatcttattatgtatatgcagatattccaaaatctaaaaacaaccgaaatctgaaacacttctggtcccaagcattttggataaggaacactcaagctgtagcagcaaactggacacgagtggaggcacatttttgtttcttcactttaagtctctgacactgccgtgagagcacatgagaaggctggcctgctggcgggtatgcgcgacttgcagagagtggagttatctcgttcattttaccagctgacaatagatgtgtgagcctgcagctgagatcagccatgcctttcccagagccgtgggaacacccagccaacctataaccatatgagaaataggaaatggatgttgatttgagccactgagttttgatattttttgttatgtggccataactaactgatacagccaagctctgggaacaggaagatgataaaacagtctcatttcaaagtcccagagactgcagctttcaaaagccactggaatcacctacaggcacggaacatggttttctcagggagtgattccagctgctaagcctcatgtttgatgtctcaggtttctttttatttgtaaccttctgagtgtctgctgttcacttcctctaagctggactgctgatgatttcaactaactttgtcatttgacaaacacctcctcctcctcatcctcctccccctccttcttcttcctcctcctcctactccttcttcttctttcttctttgactttctccctccccctccctgtcttttcatttttttggtttgcttctaaaccttctctctttttcctttgggctccctggtcactcaaatgacctcctgccacagtcttggatgctaatattaagtagctgctttcggactggtctgtttgagttatgggtcctaaaattgcagataaacggggaattactttaccacattactttgtccaattgcataaaatatgggacacagattttttaaatgcaatagtctagcaatggaaatatatggtattgagtagttagactgattttaaagcaaaattcttaaaagaaaaatataggagcatatattaggtattaataagaggaatgtatttaaatatatttcgaataatttaaaagtatattatgctaaataatatatgctgaaataaaattcagcaaagtaaaaatattttctaaggcttggaagtctattaagctaaacgtctgccaatcttatgtcccagcaattacactctaagagtaatgagtgtaagccagacatggtgatacacacctgcagtccaagctacttgggaggctgacaatataattcaaggctatgcctcctctttaatcccagagtacaaagtagtgttctatgatcgcacccaagaatagctaccacaccccagcgtgcaatacgtaacgagaccccatcttaaaaaagaagaagaaaaaagaaaaaaagaaatgagtgtattgtgtatgtgttcatcaaaaagcatgttctttattcataataataaaaagctagaaacaaatcagatgtgtaccaataggaggatgcattgatgaaatgtagtatattcacagggtagaacacatgaaagtacttaccttatgattccacatacatgaagatcaaggaaaggcaatgctaatcttgaaggaagtcagagtagtggtcctctctgaaaaaaccttccaggatgatggtgatggtctatgcaagtggttctcgaagtgtgtatcaaggatcccttggcaagccattgtgtcccccaagagactgtcagagggtctgtgtagtcctcttgtttccaaatccgtctctgtgggaggccagatttcttcatatactgcagtgaaaatgacatatcacaacagaccgaatgaagaaaaagacattagaactcagatgacttctgtaaagccatacgttaaagacatttgcaacaatgtaaaacaatgccactcctcccaccaacttttagaaaatacagttatgtttcacaaaaaagttattgtaatagtacaatattggttatatattaacaagtgacagttttgttatttttattgaattgagaaatattttgaaattcctgtttcaaatttttaacatagtaatgcttacagatataattcacataaacaaactctgagttttttaaaaatattaagagtgttaaggaatccctgaggccaaagattttgagaactgctggtctataacttacgctgcgtggaggttacatgggtgtttatacaggtaaacattgatcagggaatcagggaatacacctaagatttgtgtcttccattgcatgtataattctcaattaaacccatgttttaaaaatatagcaatagatatatgttcatggtataaagagaatggggggaatgaaatataatttagtatacaaaaatacatatacacattcagaagaccaatagggatgatgccaaaataacaaagtttacttctgaagcctgttgcctagtggaaaccatcgaagaggcataattactcagaagagttttgagcataaaattaattcagcaggctttgctgctccacaaggaaactattctactcctctcaaaagcctgtgctgagtgagggaggcagagttggatgtggaatagactctctttattcttcccttctagcattttccatgccaactctccaagtctgcaacagaaaatgatttgaaacaatacaagagtaacttaagagagagcctctcacaagggacaggaaatgacacacccgagaaaaatagcagaaatatccacttaggaaaggtggcagctgtcagattaaagagaacccagatgatgaatttggcataaattctcccaaggggatctgcagtaacattaaatgatagtgcaaagcaaaatggaaatgggtgcaactgggatcagctgagatagatgaaactttctacttgtagaagtcagtgtggcaattaacagtctaatttgggatcccactgactacagcttagatcctaactccgctattcactaactgcggacttcaggcatcctacttaatgccgcagaattggagctttccatctgtagaatggatgtaatgccacctacctcatggtgctgctgtgagaatcaagttagcttttgaatcatttaatacatacagttccaggcatatcctaagtgttcaaagagtggtattttgaagatcatttgtggctgtgtttacctttttagctgagaactcctcttcatcttaatacatactctatagaaactcttttaggaattttaaaataatatcatgtcattatttttgcatgatatataaaggtatgattttaaatatttggaaaaatgtattagattgatatacttttaataattggttagcaaagttcatttcaataagatgtttaatagagtaatattcattagatacctctgaagagacaaattccaactttttcagtataccaagctttaaaggaagataatacattttatttattcatttatcagttaatagatatttgggttgtttctgatttggggctattatgaataatgttgctatgaacattcacatacaagtttctgtgtggatgtatgttttcttttctcttgggtatatacctaggagtagaattgctgggtcacatggtaactctacgtttaactctttgaagaactgccagactgtctcccaaagtggctgcgtcatttcacacttccaccagcagtgtatgaagattctgagttctctacatctttgtcaatacttattaccttttttattatagtcatcctagtgtgtgtgtcgttggtatcttattatggtttcgactttcacttccctgatccttaatggtattaagcatcttttcatgtgcttattggcaagttgtatatctttttttgtagaaatatatatctcagaacctttgctcattttaaattgtgttgtctttttattactgagttgtaggagttctttacacattttagatactagtcctttttcagatatataatttgcaaaatttttctctcattctgtgggttgccttttcaccttcttcatggtgtcttttgaaacacaaaaatttaaattttgatgaagttcaatttgtctatttttctcttttgttgcttgtgctcttggtgtcatatttaagaaaccattgcttcatccatggtcactgagatttatgcctgctttcttttaagagttgtatagtttaatctcttacatgtaggtctttgatccgttatgaattctttttatatctactgtaagggtgaatgccattcttttgtatatggatagctagttgtcccagaaccatttgtttttgtttttgtttttacataagttctagagatctaccgagcctctgttgaaaaaactttttctcaatcaaattgtcttggcatccttgtcaaatatcaatggattacaaatgtggaggtaaactcactgttaaactcccatcatgtccattggcattgcttaagatgtggatgaccttcacctagccaaatcccatgtgtctcttctacatgctcatcaaaacctctctgcaatgtttgacacagtcaaccattgccccattcttgaaacactcgcttgtctttgtcttcatgacctcaaactatgtggaggcacaaacttcccatgctccagtcccaccttatctaacaaaatgctttcttttcttcctttcacgagaaaagatggatctcaggaatcttttgtctatgatgcttccatcccatgacacccttccaaattcttccctactcacaatggaatgcagaatttatgacccagaccacgtctgttagccattagttctagacttttgtcttttacacacttattcttatcacctcatgtagattgcaagttcacattgtattcctcttctattactgcataacaaatgaccacagagttactgcaaacccacttactatctcacaattctgtaggtcaaaggtctgggcacagtgtggctggattctctgctcagaatctcacaggactaaagtgaagcgtcagctaggctgtgttctcatctgaggctcaggattcacttccaggttcaagtagttattttcagaattcagttattcgcagttatatgattcaaatccgcactcccatgctggctgttggttgatcaaggatagttctcagctcctagaagctgcctagttccttgtcacaaggccgtatatataggtcctctttacaacatgacagcctacccattcaaagccagcagcagaatctcttttagcattcctctttcaggaaggatctagcagttccttttaaggacccacttgattaggtcacccctaccaggataatctcccttttgattacctcaaagtcaactggtttgacttattatatctgctaaattaattacatctgcaaaattcccccatttcaggtaatgcaacctaatcaaggaagttaaatttatcagattcacggttctgcccatgcttcatgggaaggggttattcagagtacatgtacaaggagatgagagtattgggggccgtcttagatttctgcctaaacaccacatgcacgcacacacacacacacacacacacacgcgcacacacacacacactcatagcacagactccgaatgttaaagttaaatctaacatgtttatagcatttagtgagctctctcatttaattttcatgttacaggcaaatggagaaccttatcaccattgtacaaatgttgaatctgaggtcacaaagcaacaccatggagattaaaaaacagaacccatttattctcctgggtccaaatttctgttctctgtagaaccaccacactgtcatagagatcatcacatcctattcttaaaaaccatgaacacaaaaccacctgacagtttacaatgaacaaagagcatttgtcaaaggcacaatgtcatttcattgtcatggcaacctattagtacagtttttatcatttctgcttcaaatgaggaaatgagtgagtgagcccctcagtacagcacttagcacagtaaagaacaaataatacagcctgaccaacatggtgaaaccccgtctctacttaaaaaaaaaaaaaaaaaaaattagcagctcatggtggtgggcgactgtaatcctagctactcaggaggctgaggcaggagaatcgcttgacccctggaagcggaggttgcagtgagccaagatcatgctattgcactccagcttgggtgacagagtgaaactcggtctcaaaataaaataaaataaaataaatgaacaaataataaactccctgcttttggtgctgttataaattaatttatggataccatcatacaaggtgctgtgaggaaaatgcaaagaaacatgatccctgcactagaaggatttatttgttgataatacctcaggatttgataaatcccatgcattcccaatattaattagatttggtttaaagaatgccaatcaaaaagggagttcagcagggtaataaaatctaaacagaactttgcttttgaaagtctagtctacgagtcaggaaactatatattccactggccaaatctggtctctcacccgtttttatatggctcatgagataagaatgggttttatgtttctgtggttggaaaaatgttaaaagaaaaatatttggtgattcataaaaattatatgaaattcaaatttcagtgtccataaaaaaattgtactggaacactgacatgctcatccacttaaatatgacctctagttgcatttgcgttatgacaacagggtcaaagatttctaacaaagaccatatgacctgcaacgtctaaaatgtttgctctctggccctttgcaaggaaagtttgccagccttcagtctagcccatttaccctagagtagagaagaggggagggatgggggtgcagaggcagagtggcaggaacccaactctagctttcggggaggagaagcaacaaagtctccttggagccctcaaagacacagggtttctgaagtccagggccaggaagtggcagaaccttagatggttctgctgcctgactgattccaagccttggtttctgctgcttttggaacctttgcagacaaagagagctgccaagaatgaaggcttccttgggcccggcacgcttgcccttgctgggttggacaggagacaatggctacagtgacctctgggactgaggagtgggcacctcccccactccccaggtgtttaaaagccgtagtgtgattgtgtggttctgaagaagaagacaaatggtgcgggatgtcacagtgtgtgttctgcaaaaagtagagcctcggacaaaaatttgagtgcaagtattttatctggaggtgatcccaggaaatagaatgagggtttgggggatggaagtaaaacaataaaggaataattacggagaatgttacctctgtgggcgatgggcacaatccccctagatattcggcaggatggtgtagcacacacctcagaattgtcccaccagggtggagacaaggggtatttatccatcagcattcccttctctttggatgggagtttttcttgagggtagtgactccctagtagctagctccagccagcccctcatgggccaagcaagctcctggagccagagaagccctcagggagagagctgcatgtgccagaggcaggaagtcttaggcatgaatgagatagtactaaagctatgggaggttgaggagacaagggaatatgagtggggcaccaaaagtgtctactgcagtgggctccccttcaactttggagagttagcagcattgggagagaacattcaaagtagacttactttgtttaaaaaaatgatacttccagctgctggagtgtgcccgatgttcatatatgtgccttaactttcctgttagatggcagactcctcaatgttatgcaaaaagacacatcctgaaattttcttagtggattatttgataaggaaaaaatattaagagttatttgcttcctcttttctttttctctggctatcctccggtatggacgttattcgcaagaaatagaaacaacaaaagtcccgaataatctaaaataaggtactcttgaattatcaaaattaactatcaaagtcagtgagaactaaccagctctgcattattatttcccatcttagatattctagccattaggacagaaaacatgaaagacacaaataccgtaatgtgtgctatattttagtaacaataaaacctctaaagatatgactgcattgtgggctttgtttaatgattaacaacaaaaaaaaggatggtgcatttccagttgaaactgaatccagccagctttccagatttcaaaggctttataatggaagaaacagcccataagtgggtcacaaacaatcttgtccattaatcatcccaagtctagcagatatgcatgccgggtgccaagaaaatcatgagactctgtctcaaagacagtgtgcctttctaaattttcttcttaatgtaaaagtctaatatttgggttcagtgatattttgcatttgtatgagaaaatggaccccactctaagagcaaggataaagcaacacacccaactttcaagaggcaagaaggatccttggtaatcagagtctcaggtttatacatccagcaatgacctccctgttgatgctcaaatactcaaagctgccgttggaaatttaatgggcatttcaaacttaagttattcaaattagaattcctgggtttcttgcctgctccttcccagcctcaggttaaaactctcaggattatcttcgattaatggctttctcttgtccctttggtataatcgataagtattatcagctcctcctccagcatatttctgaaatggaatcacttctcaacactactgagataaccaccctggttgtaaccaatgtcatctcttgctttgaccactctaacagcttcctggtttcatttgcatccactcttgagctcgtgcaatcctctctgcacgcagtagaagagtgatcttcttaaagtataaatcagactgattgtgcaggtcatctgcttaaaatcccataatacttccctctccactaaaaataaaggccaaactcctttcctaagcctataaaccttcatgtgattctgccctttattccagttatctattgttgcataacaaactatcccaaaactgagtgcttgaagcaacaacaattcattatttctcatggtgctctaggttggctgacctcagctggctagttcttctgctccacttggtattgactggggtcgcttgtatggctgtgcttggttgggaacccagctggggctgaaatgtccaacatggttttcctgacacatctggtgccccagttgggatgtctgcctgggctgctcgctccctctccacatatctctccacatttagtggtcaagttcaagtttctttacctggacgctgaatctcaagagagcaacaaaggaaactgccagaatcaattcttaaagcctaggccatgatattccattggtctatgccattggtcaaattaagtcataaggtcagcccagactcacagactcaaaggggagggaagataggtccacctcttgattggaagaaggatattaatatacaagaatgggagagattttgggcagccattttggaaataaccttccatacctacctgcctctccaatctagtttcatatcaatctaccccagtcacactgtgcatctttgtcattccaaaaggtgctgagatagcaagtactagtgttccccacaatatccttccacccatcatcttccagaatagaactggatctcagctaggttcatggcttcccagagtaaatactacatttcctaggctcccttgaagccaggtatgaacatatgaccatatgattccattctgagcaatggaacgtcaggagaagtgtccagtggaagtgttggcgaaccttccttagaatacagcagtggcctctccattaacctcttcctcctgtgccctgtgctcttctatgctggttggacctacggggacatggagaatgaatgtcttgccacgccgaagaagcctcagtctctgagcccacatgatggccaactagccctggaacaatgatcccaggatgtttctttgaaggaaatagactgctaacgtgtttaagctacagttagaaggtgtttttcatctttcacagccacttaatccttactgctgggcatctgcagtggagggaacagcaagagcaaagggccaggggctggagagcatccagaatgggagcagagccaaggggctgagtgattgcagaagaggcaagggtggccaaatcatgtaaagcctggtaggcctggcttttccatctggatgaaatgggaaacaattacagagtttcgaggaaggcatgacaaagccttacctacactgtagaatcactcttgatcccatgtgcagaactggccatggcagcaccatggcagaagcagaggctgattaggaggtacttatctagatgacagagagtagtggcatagaccagggagagggcaatgaagatggtgaggagtggtcagatcatgtgtctagtttgaagggagagatgccaggatttgctgatagattggatgggatgtgggctatgatggaatgggaggagtcagtgttggtctagaaagttttggtttgagtaactcccagctacttgggaggattgcttaagcccagcagttcaaggttacaatgagctatgaccacgcaactgcactccagcctgggtgacagagcaagaccgtgtctctaaaagagccctttgctcttgctgctcctccaatagaaatgcccagcagtaaggattaagtggctgtgaaagatgaaaaacaccttctaactgtagcttaaacatgttagcattctatttccttcgaagaatctgggatcattgttccagggctggttggccatcctgtgggctcagagactgaggcttcttcagcctggcaagacactcattctccatgtccccgtaggtccattatagttagcggtagctaactttaatggagtagtttgacaaggagcagggttttttttgcaagggtgaggcattaggagtttggttttgaactttgtattagccagaattctggagaaacagaaccaatagaatgtggaaagagaaagagagaggtttattttaagaaactggctcacacagttatggaggctggcaatttcaaaatcggcaggaaagcagtaggctggagacccagggaagagttgactttacagcttgagtctgaaggcagcctggagaagattccccactttctcagaggacctcaatcttttctcttacagttttcaattgattggataaggccaacccatactacggagggtaatctactttattcaaaggctactgatttaaatattaatcatatctcataccttcacagcaatatcgaacctagtgtttgaccaaacctctgagcaccataacctacccaagctgacagataaaattaaccattaaggctgggcacagcagctcacacctgtaatcccagtgctctgggaggctgaggaaggaggatctcttgagcctaggagtttcgagaccagtctgggtaacacagtgagaccctgtctgtaaattatttttaaggttgcatttaactggttgtggtggtgtgtgtctgtagacccagatatttgtgaggattgcctaagcccagtagctcaaggttacaatgagctatgaccatgtgtctgcactccagcctgagtgtcagagcaagaccctgtctctaaaaagaaaaaaccccattgtggacatgtttagttataaacggctttatataacccagtatagatgttgagtaggcatttggcaaacatttgagatcatgaacatatgcattttgtttaaagaaacaaaactgaatgatacagtcaactgagtgagtgtagagcatataatcttccagatcctcccacttttttttctgtattctgactgtcctgtgacctggccagcttcatgtttaatccctgaagccttaaattcaagctggggccttcaacatttccacgcactggtaaacttgtttgcattgttgcccaaaactctaaaaggtcaaacatgttgttaaacacatagaaactagcccctgctctgagccaaattccttaaacttccagataaacttcataacccaaccccttcactggagacatacctgggtaaaacatctcctgtatcactgtccctcacaaggaagctgcagcaccctgtctatataaattcatctaagaaactcgttggacaatcaacctggtgtttagcgcttctttggaatccccactggccccatctcagaacactctgaagcagtccctagtgggaactctcctgccaccacttttgaggcaactctagctgcagattcagccagatggaacagtaggaagagacaagaagatgtttgaggattagcatttccatcttaagagttagcacaagccaggcatggtggctcacaactgtaatcctagcactttgggaagccaaggtgggaggatcgcttgagcccaggagtttgagatcagtctggccaacataggaagaccctgtatctacaaaaataaaacaaaacaaaaaactactagccaggtgtggtggcacatgcctgtactccccgctacttgggaggctgagatgggaggatcacttgagcctgtgaggtgaaggctgcagtgagctgtaattgcaccattgcactccagcttgggtaacagagaaagccctgtctcaaaaaaaaaaaaaaaaaaaaaaaaaagtaatcacaagcgaggaagagtcgccaaggaaactgtgaggaaaccagtgactcatgagaaatgcaagagagtgaactgttctggaagccaatgagcaaagggccttgataaagaaataatcaactgtcaaatttggctaagtcaagtacgacctgagaatttatcattaaatttggcatcttggaaacctgaaaaacctcatgtatcagtttaggttgaacccatggagaagcaaaaccagtagaagatacctgttaagagatttactgcatggaactggcttatgtgattatgggggaataagtggataagtccaaattccataggcattaggaaggacaggctgggactctcaggcttctgttcacaggcagattgtttttttctccagagaatcctcagctctgctcttaagaacttcagctgattggatgaggtccaccagtttatctaaaatatctcccttgcttaaagtcaattgataatagactttaataacagctgcaaaatatcttcacagcagcacctaaattactgtttgaataaaatttcctaaccaagttgacacatcaaagaccatcacacctcaacaagaccaacttgggtgggtcccagttgaagtgggctcaagagaatgggaagaaaacatggagatagtgcttgtagacagtcatttcaaagagccatgctatgaaaagaagcagagaaatgaatcggtgactggaaggtaattggatcatggtttaaatggctgaggtagaatttaagagaagaccattagtagggaggagcttgagggactggaattggtgagattagaaagccacagctatggatagtgaaaccaccaagaggaggaagaggaggaggaacattacagagagtgatcttgagtcgatagctaacatattcagagaatgaggcgtcactcattgttgggatgggagtaacagtacatggttgcatgagaaagagtagtggagttacagtccgataacatcagatatgaagctgagagagaaggggctgtcttggggggaaaaataagacagtagtctgggagaacaacaatgaagattaaaggagacacacacccttcagacacagtggcactaaagtttgggagtttacagctccctcttgaaagggctgcacggaaagcagtgtcccttcatagaatatcctgatctgagttagagcaagcaagggaggggtatttgcagagaagaagttgcagatttcaggaattttgctgatgactgttcatgagttccagaagataagtggggtgggagatgacattcttatggggggtttcagagctgtataaggaggagctgagggcctgggctcatggaggtccctgacagggtagggataaaggacacaggagaatagtctggatagtttccagatggtggtagtgacactgtggatgctgaggagcagacaggggcagggagagtcttggcagcagcacagtgagttctaggccctattttcccttttactaatggggatataaaagctgggagtaggggagttgtatcccagcacttaatcttccaggcctcagtttcctcatggaaacagtaatctaagagttgggatacaatggagacattgctctttaaaggagtctggtgtagacaaaagttagtgtatttgttctctttcagtcttaaaaaacaaggggacatcttggacacaaggaaaagtgtttgctttccccagacttagaaagctatagaaaaaattcctgcactctatttattgcacatgataatgaggaagtgaaaagccctttactgccctccttccctcgtggtctctatgcctcatctgagcatatgcaccaaggctgagtgtacagcagcactcgagctgagatgactgattccctcctccagccttcccccaggccagcagttcctaaagtgtggtccttggacctgcagtatcagagtcacctgggaacctattagaaatgcaagttctcttgctgcactacagtcctatggaatcagaatctctggggaaggagcccaacaatgtgcttcaacaagccctgcaggcaattctgatacttgttcaaggttaagaatcactgctttagacacaacacacatttcggtcagacagaatagcctccagttttcctggtttttcatactcttttgtatccctggactttgatgcttgaaaatcctcccctgcagtggatctgcctcccacacacttctagaccagcttggtcaacacctcccctgagaggctcttcccagccaggctgagggagacacgctcttctctgcatgcagagaaaaattcctaccgtcttctacttgagtatttattatattgtttcataactgtttacttgatctcactcctgaagacatggattttatcctcccacatttaacatttgaaatgcctattatgttttaaggcactggagaataagaactttttttaaaaaaagattgagatctttattctaataaaaaggaccagacaactaataatgtaaatgaatgtgtttcattagttctaactctgaatgtgtcctgatcgatggcatgccatggtttaactggcagcgtgttttgcttttgtaatagtacataaaataatggtgtggtttacaataatgtggaaccttaaatttgatgaaatgcaagctgttaagaaagtgatacgttataaggagaaaaacaaagcctggacgaaggatgggtggagagagggtatcatttgaaacaggatgtccaagaaaggcttcactgagagggtcccatttgaagacatacctgagtaaggcaagtgaggagtcctagggatatggaggagagtaaggatgtgggaagagcattcaaggtagaaggaacaatgaggacaaaggtccaagggcaagaaaaatggtgtgtgtcttgttgatctgtttataacagagcttagaacagtgtctgataaatacccataagtgtttctgcaacagacctcagcctttggtaacgtagggatacttttagaacataatgattacaatgtatttccacttcatgcccatgctggcattactgactcctggaaataacaaagcaatgtgatagagaagtgtaaattcaggaaatactgttttccgtctgtggtgttgcaggctttatgacaggtgttggggatacagataaatatggtccttgccctcaaggagttctcaactagcaggaagcacagaaaaataaccacaatataaagctataaaggtacagtcacaggtgtatgaaatgtattattgtagccacataagaaggagtaatatctgtgtttatttatactcctgtcaaaccctatttcaaatttcattctcttggagggaagtaatgagcagtcttttagcagtaattgggttggactatttgtctgtgagaagtacatctaccatatggtttctgatcttgatattttatcaaatctccaattgccaaggtactttagattccaggtcacacgtcggacattcttaagaaatgggacataaaacatggcctaaaggttacatattctgctactaatgtcattttttaaataataatgcatcaaagcacttgaatgctaggacaagatgcccagcaaatgcaacttgctactctgttccaacttgtgacacttacaaacctgtaacatggatttccgccctcattttttttgttctttttgagatggagtttctcactgtcgtccaggctggagtgcagtggcatgatctctgctcactgcagcctctcccagattcaagcaattctcctgcctcagccttctgagtaactgggattacaggcgtccaccaccatgcctggctaattttttgtatttttagtagagactaggtttcactatgttggccaggctggtcttgaactcctaacctcctgatctgcctgccttggccttccaaagtgctgggattacaggcatgagccaccgcacctggcctcctccatcatcttttaaaagatgtggaaggtgagctgattcccagctggctttaagtgcagctgagtcaagtaatcaaagtcctgtggccctgatttctctctcttagtactgattttctctatgttactggaaactctgtttcctcatggtggaagcttaagttgtcaccttctggcagctccagaccttacatcctcttagccaagtcctgagaagaacaagaatatctttcccacaagctctgagaaatgctttatccttcctcataaggtcagatattgatccctataccagtaatcagtgcagattcaacatcgccagaattctatgcaatgagagttggggatagtatttcctttgagagaaatagagtatgggtaaaggaagtagtagtacatacctgcggtggggcaagagcaaaacagatgtctactaaatctcctatcaaaacatgaacttgattggtcatcacaccagtaatggaatggcccctgcctcatagctcctgaatgactgacatactcctgcctcttttgtcctgtcctcacttttctcatacacccagcttcatatgctatggactgaattgtgtcccctcaaaattaatatgttgaaaccctaatccccaaagtgatgagtacttgaagattgggttttggggagataattaggtttagatgatgtcacaagggtggggccatgtgaggacatatacagaaggcaacatgtggcttattcagcaatccaggaagagaaccctcagcagaacctgaccatgctggtaccctgagcttggacttccagcctccagaacagaacgatgagaaagaaatctctgttgtttaagccacccagtctatgacattttgttatggcaacccaagcagactagtacaccatagaaaggcaaaattatttggacattctggtttacgcacgcttctggaaatttgcaagggaacagtgaaactcaattctactttttgttctagttgaagtaattgttgagacctgcactgtctaatacagaagcctccagacacttgtggcacttgagcatttgaaatatagctattccatattagaaacaccagacttcaaagacttaataaaaaatgtaaaatagctcatgtaaactaaaagtcctaagccctcctccaccaactgaatggacaccctcttggctaagaccgactgcagagaaaccttaaaaactaagttcccggccacgttgggacaagaggtcagatacgccttcttatttcccttcccttttgtggtttaggcacaataactgaccataattaatgttaaaatagaggtcataagactgacagaatggactctttgtggtaagaaaacaccaaattacaaacaggacttcccatgccaggcaagagttatcatgcaccaccccccgcccccccaacacacttaaagaataaaccaggttctaattgccaaggttttttccttttctccttgcagctaaacaagcactggcctcaagagaagcaatattaaaacaatttgcagctcaccaccagccgctgactaacggcgcccccctgttccaacagccataactacagctttgattggacaagaggctgatttcagttaacttcctcctgatgagaaaaccacagccatggactgattctggccggtttacagaggctgtgtacttggttgcctttgtgtcctaaaaaggaggtgtagggcctaattgtaatacatgtaaatgttaattctccaccccaaagcacacatggttatatgttacctgcatgtttgttcagtacacatgcctcaggaccaccttcatgagtatttgaagctcttcgtataacctgttgactatgtatgtttggccaacctgttcaactaaaatttctgtctaattcctctctccctcaaagtgcctatttctggtctttgctggaagctacacttcccagctggtaggatggccacttggcaggctgtaaacttttacaagaaataaagtctccttttcgaaatgtatagatcttgtgatttttcagttaaccctcactgcatatttgttcttgattagatgttgagaaaaatattttggatatatttggttaattaaaatacattattaaaattaattttacctgtttctttttttactttttaaaatgtacctacaggatattttaaattatgttaaattatgtgtgtgtttcgcattgcatttctaagggacagtgttgccattgagattcctgagatgctctgagtcaaccattcatttcacactctggttctcaaggtgtcgtcccctctgacttgaagcatcagtactacttaggaacttgttagatacacaaatacaccaccacacctcaaacctacagaatcagcatctctgggtgggatcagagctgagcacacccttcatactagtgcttctgaaactgatggacctggaatgggattactggacttggcaaaattaacctttgcaagagggtcaggtttactgaattgcaaagcaatttaaaatataggattttgtgccaaaaatgttcaaaactagacaagaatattgaagcaaagcgagctgttgtgctctggaagagggctgcttggcttggcgagggttttgggtcgtagggtgagataaataagtaatcaagcccttctaccatttagttgaaaatgagagattgggggatttgacctcataaactaatatttattgaatttgattttaaacatttgattctaaatcctcacaaacaccctttgtggtgggcactattatcaacttcattttgtgggtaaggaaaccgaggcacagcgaagctgattagccatacttggctaattaagtatggttcaaggccatacttgctggagtcagaatgactcaggctacagaatgtcaggctacagaatgaatcaggctacagagagcagtgggcttaacactgcacatattgtcttgcccaggctagacagattagctaatctaactaatctgtaaagtgggtatttctacactagtcattcctggctgccattaaaatcacctggagacacccaaaacacacactcctgcctaggctccagcaaaccagagattctgattccattggtctgaatgcactcaggagtgcataagagccccccaggacctccaaaacagctcccacttgacaggtgatgaagaggaggctgggaggaacagggttgaacaggttgtcaatggctaaactcaggttctgtaaattgggcaagggcttctccaaccagactgtacacagtccttggatatctctcagatgcacgttccgatgcagtagggctggatgaggcctgcaatcctgcagtctccaagggacagtgatgctactggtctcagaaccacactttggattttggacggcactttgtcagatgtcccgaaccatgtggtgtttcctggccagctagagagctggggctttcctgacagactggtctgggagaacgtattctgctgaggtgcacccagatttgggattctttaagatcccaggtttgagatccgttcagtgatctccaagacccagctaaggaggtaggccttggagcggagttggagttccacttcttgagatggaggaagattctaggaagctgaaaggaaaaaactcatggttactgcccagaggcaggaatcgccgcaacaccacccttctccagttcgtctgctctcctctcacccaagctcagcctctggcttcccactcttctcattccctctgactccagcctgagccatggggtggggtgtcaggacagggacaagcagcctctccctcccaggggatgcacgactttcttcgtcttgctggagggtcagacagaaggaattcaagcattttgatgcgcatttctccctcacccttctacaaccctccctcaccactgccccgactttcaataccagttctgcctccttcctccaaactggttggcgtggcacggggttggcccttggcttcgcagtgcccggaggttcggagcgagcactggaccagagcccaagttcccaagttcccattccacggggagatgcggactttaggtggacccggaatggaaggagggtttttgctgcccgcatgcccccagggctctttccgggaaatagaagggcgagtcctttgcttccgcagcgtccggtgggaaaagatgccacgtggcgcggtgcgggcggactcagaggccccaggcgcccccgggaactgccacttactcagggcccgcggtccctggcgaaaacgggcgtggcgccagtgctcagaccgtgaagtggaaaaacggatcataacctcgcgttaaggggaaattcaggtttttttctctgagaaatgtatccttccctaaccaaaatccagcacctagggccacccatccctcggtccctgagcccaccctctccctgcaggcacagctatcccaggttccggcccatcaagttgggaaatgagacgatccatcagtgccaggctcccgggagctgcagctggctccaagtgcgtggccggaggcgtcccccatctgcacgagtccccagagtcacccgggaataactgcgccgccgccgcctccgccgcctgggctcccgacctccgcgcgacccgcgttagctcgcgttgcctgctgtggctttgctgctctgggctacaaggccgggccggcttgggttgagactcccgaggctgcaggcgaggcggtgggtacaaacttccgtagatcctgctgtttctctgaagaagaagaaaaacattggccccggagaattagataatcctggggaagaaatagatttgggcctggggcctgcgggggtaggtgcccacgcggggttgctaggccaggggacacctctggtggacagcagaggcctgggggatctcacaagcaggggcaaggctggggcacccccaaatctgcttttaagttgaaacaaacctaatggtcaccatggagaaaaaaataaccgaatgggatattttcacacccttattttgagggactgttgaaaaaatccccagggcttttatcaggtgtggggcctcccagagttcgtatatggccctcactggaccaggggagagaggccggggacaggccacccttgagcgcagccagacacgggatcttacatcccgcctgcggcgtcgggcagcgcacctggcgggctggaccgggacagggggcggtgcgcaccggggctcccaagcagccttagcggtggagaccttccgaggggaggcgagcctgcggtttgtctcccgttaaggtggaagactggatttttcctccagttccgatctagggtgaagtcccttctcccgcgccctcatgcccagattggggaatgaggggacagcagaaaaaaagccctgacatagcccagagcctccagcagctttgggcgccctgaggcgttggaggtaggaggaggtgtgaatttcattcccgcctctctgggcatggagcttagcttagcgaatagggaccctacagagggaacaccaatgaatgagtccaccttctctcctggtcctagggcccgaacccacttgtctccagggctggcgccagccccgcgcacaaacaccgcttcctctgggtaaccgcctggactgcctgcgcgccctcggagcccgcctggttggcagtctctgcttcgatctcctctaagcagaatctattttctgtttggaaaatctcttacaggtcctggggttgtcccaggaccaaactgcagcgaggccgcgcgcccctggccctggaacgcagcatcctccccattttacctggaggctagatcgttggggctcttcgggggaatttccctgggcacggatactgtgctggcggtttagaaaagaaaaagaaaaagaagcgaagcctctgtaacctggtctcctccctctcctcggtttaataccctgcctcccctactagtctccaggcttttctctggacaggggagggacccgagaagcccgcggccagtgatcgccagggtctgtctcgtcgcccatcctccccgccccagagcaaggtcggcagaggcttcccggggcataagaacttcaaagaaagtctcagaggagccacgctaccaggaactttcgtcgccctttaaaattgtcagatagacaagtaaaaacagtaactaactaagggaacaatggactcttgtgacatgtgtaactcttccaggtaccccaacactaaagaccccgtggttcctgtcgccatggcctgaacgtactcaactccagccccggggctgacctctctccctgagctttggagcgggtttggacctagccgttgcaagtaggcatgacttttatcacccatcgctatacccagagcagctgctcgaatgtgccaaggagcccaactcgggtgcaaagcgccgacgtctttcccaggttgaggacatcgcgagccagaggtgcaggcagcgaggcgcccaacagtagaatgcatcttccttcccgcgggcagaagccgtcaagtctggagtccgcagcgggcgcgcgggccagcccagggatactgagccatgagcaaccaggcccacctaccgccgcgccatccaaaggtaacaccacagaccacgggccatgtgtcctgagcagcgcacacttcctgcacgttcagatattacatgttaataatgaaattccgagcaccccaccccccatcagccaaaggatattgctcagattacttccctactcagatcactcagacttggggcatgtagttctggaggtatcctttaggaaagctatgtcgaagaccagagaattgaagccactccttccacatgttgtcgctactagagtaataaagtcataactaacatatcgcttcttatactcccatcccatttgcctttccaatacactctccctttcccactaccttgttactaaaacatcttgctatgcttttacaacgagagagagagaaaaaacaaagtcctaaacttacaacatcagagcaccccagggaattccaggactccagctacaatgcaagcaaagcttcaataggagacagtgggctctgggctccactctcaccctccttcccaaaggccattaatataaattttccttagttccaaacacatcttcaagttaatatgcagataacttcagatagacaattaaaagagtaatttgccggtcacagtggcttacacctgtaatcccagcactttgggaggccgaggcaggcggatcacgaggtcaggagttcgagaccagcctggccaaaatagtgaaaccctgtctctactaaaaatacaaaaaattagccgggcatggtggcaaatgcctgtagttccagctactcaggaggctgaggcaggagaatagcttgaatccaggaggcagatgttgcagtgagcgaagattgcaccgctgcactctagcctgggcgacagagtgagactctcaaaaaaaaacaaaacaaaacaaaacaaaaaaaaaacagagagagagagagagtagtaaccaagggaacaatggactcctgtgccatctcagagattttgagggtactgcattatcacagaattcaggtagcaaaatatgttaaatgagacacagctagtctaaccttaggcctattgtgacagatgtcatttcttggagaacagactcattaaagattttttaaaatcctcaaatgagttttaattcaaccttacagaaaggtgccctgcccagaagttaacaaggttttcctccctcccgagatagcagagtgagttgtgtatcactgaccaaaaatgtaagactgaccagaacagttaactaatcacggattcaaaagacaaaaatgatttatttgctactgaaattttgaggaatgattacctggcccctcaccatttacttatttagggtttgctataaggatgcagttctctatattgccccatgctgaaggcaattcttctaaatgaactcataaatggtatttttttcaggacttagtgtgaacatagccaataaaaaggccgttattctggtggtttgtttcctccactggttaccgttattgcagaaataaccattgtttcattagagtagatgcaggagacaccaaagaagcactaggatgaggaaaattacaccaagggcatgcagactgagtgcattggagcctaaactcaattttctgattctttccaaatattctagggcttagcaatgtatgtgcgaaatattcttgtgcatacattgctcatgcgcacacttatttttgtactctttgctctggatctaaacccttgtgggatagaaactgaaaaataattcttgtgcatacatttatttttcagtttctgtcccacaagagtttagatcctagaaagggttgcgaaggtctttgaaggcaatgactaaatgaattaattgttctatgataagctgaacacaagaaaagttttggtgagtagaaagtctggcttaacagctgcatgcatcttgtttgtttaaattatttctgcttctgttattcgggtgtgcgtccgttgtctgtgtgtgggttgcagagggatggcttggtggctgtgggaacaacagagcaaggagtacatttttacactttactgtaaagtgaactgaaacctcaataaaccaaatttcagctgcaacaaagcccagccttttccttttgaagctataaatacgcttttcttattagtattgttcactaattttcatagttttgtttcttgattctacaaatacaagtcaattgcttgcacaaccaagtatgaaaagatgcccctaacaacttaaaaagtttaattttatttagaataaattttgcataggccattcttttgcatatgccatatgtgggtaaattatcaaatacggaaatgaaataggggttctatagtacataaggcattgttgatttacggcctaatttgctttttattgcaaatggataaatatggatggatgaagagttacatctttgcattgattccctattcaatagatatttcttccatccgtatccttccttccaccctacatcagtttgtcaacttctttcaagactcaccttctccaagagaccttttttcatcaatttcaaccactctcccacctgggatgcctgtcttacttttttttccccctgaacatttatgcagacactgtgctaggctaactggaatctttatgtaaattcttctcatccaaattgaaagttctatgcaagggcctcttcttgcccttttataaaacagcaaccactcaatggcatgagattcataaaggctaattcagtaagtatccatatgaattgaaaaacagcctttgaaggacctagaagatctagaggagatcccaaatccagtgtgtttaggtcacactgcaccctaacagtttctactgaccaccagcagcaataataaaaattgacacagttaccacccacacaggtgtacatatttatgtcaatttctcctaccatcttttagacttgagaaatgaaaagtagagcaaattctggggaacattgttaatatattaaaatgcaatttaatggcaaattttgctccttgatcacttctttgcttattttagagaaccaaagagtttttttccagaatgattagaaagatatttaattaatgtaggtgaaagttgtaggtataatgacctaactcctattgcaatgtatcacagtggataagatgataaattaatgggcatttgttagccatgtttaagattaaatattaaaaaagtcattaaactgattgtgctttgaaaataatccccccagaaaaaaagagttaaaattgctttctttcttctttcaacccatttgagtactctagggtacactctccagtgtcaacaaagagatcatttatatcaggtataattttcaaaggaacaaccatctcatttgtaaatcaactactacattttaagatcaatgaccaatgctactactcacctaatcttttattattaaggcagataatcatgaattaattcagttgatcttttaacaacttatatagtgaagatatctgcaataacatactgcaagagaaattgtcaaaatcttttataggtgtctctcctacttgtgtaatgataaatatcttttggttttcaaagcatcaagcatactggaagtagtaagtattcggttaatgtttatggatctatttgtactttgtttatttatactcattggcccatttggtttaactagccatcccctgagttattttcccaatttttcagatgagaacaaataaaatcttcagaaggtcacaaaaataataagtagtgaatcctggactgaaatctactcatttctgtcctcataaaatactggagagagagagagagagagagaataaatactttattacatgtctcattgttttccagttttacagtactacaggaaaataagtgtttaataataattgctaacatgaaaaaatgtaacacatacaaatgttatctcttccactttcaactgatgagaactgacgttttatcaatcttctgtataaaatcatttctgttaagttctgtaaaatttgcatcaattcttctatatataatcatctttgtaaagttcttgagaaatgtttggatgaaatactgaactacaaacataaaagtcaagatgtcaaaatataatgtcaattttaatattactttatactttgaattgctagtgatctaatgattgatataggaatatgtttgaaagccaaaaacattatatagatactttgtggcagatatgtcagaatgtgattatacttaaaacagcattctataaatttgaagaatgtgaattaatgatagagatttcagatttcagattattatttgatattgaatatagatttttatggaagtcaaaatatggagtaaaaatattatataaggagaaatgaagataatctcacagagttaaagcatgtgatttttgtattttaattctaactgaccatgtgacatttgggaaggtcatttaatttatttgagcctcagttttggggtatgtaaaaccacagtaactcatatctttccttgcctaccctctaagattggggagaatcaaattagataatgcaggtgaaatactttgcaattttccctttaatatgacattgttttataacattatattactgatgcaacatttatttgcattatgaaatatcttctaaggaataaaatatttggacatcactacaattgatgaggactgcatgtgtatttttgaaagctgtattctgatttacagagcaaaaataaaaaataagcaagctaccaaatatgtaaatacaggaattagcccagtagtatttgttcttctgttccactacaggctttagagtaatatcagtgtgtgtttttcttacataactatgtgacattacttagggcataattctaaaatttctgtcctaggagacactagataactctcaaaaacttctgatttgcttgcatccctttttggcagagtggtcacagtataatgcgggagggtaggtgaccccagagttcagagtcctcatgcacccgggagcaaaattcacaggaaaataagcccacatggagctactgcattgtctgatggcctcgttcgaggaggcgtcaatttaactttaaacccatgagctcattgagagcaggggagagaaggggatgtctccaaattcaggaaactgttgccatagcattttcccttctctattcctgcatagccctcctcccccgaatcagcaacaatttttgctccaccgttttctttcgggaaccagatgcgttttcagaagacagtactccagtgataaggtatctacaccacttaataactgtacctggtaaggagatttaataaggctgagggtggtattaagtttctcagaacagactcatctttgcggatgcagttgcagaacaggaaacagacccagggagaagtttagtccccccagatctcattggccctccgcacaagccaagccacagccactcctgccacacaatcggattgctttcagcactcgcagccgtggaccgccgtgcggtcctttcctccgcagtgagccgatttgctctgccagcagctgtcggtgccgcgctcgacaccgagtcctagctaggcgctcacagaatacgcgctccctccctcccccttctctgtcccccgcctctcgctcaccccggcccactccagcggcgactttgagggattccctctctggcggcctctgcagcagcacagccggcctcattcggggcactgcgagtatggatctccaaggaagaggggtccccagcatcgacagacttcgagttctcctgatgttgttccgtgagtagcgatttggcgactgggagagaggacgggcactctttgcagagaacagagccggcaaagtaaagtcaattagcttgagataaaaaatatggcccttaatgttttgcggtgttttttctttttttcttttaggggaggagggagggccttcctcgccggtggcagggaattcccctgagagccatacacctctgtggcatattccagacagagcctagacaggccagcttcgtgaggtcagagcattggcaagaaatatttactttaaaatcccaagatgtagaaaacagccagctatattacaaacaaagtcaggatttttaatttttttaactgtattttcattataaattaacagcgaaggaatgaggcttgttagacccgggttagagaaacggctcgtagagcgcacagctgctggcagagaactttgtcactccaaagcctgcagagcactgtctccccaccctagcgcccgagacgcgtgggctgagccctgaactgatggaattgttttgtttgttccgcagatacaatggctcaaatcatggcagaacaagaagtggaaaatctctcaggcctttccactaaccctgaaaaagatatatttgtggtgcgggaaaatgggacgacgtgtctcatggcagagtttgcagccaaatttattgtaccttatgatgtgtgggccagcaactacgtagatgtaaggaatctttcccccccctcagcttgctcctagggctccagggcgaagggcacccttcctcaaggctcttcgaagacctgggttgcccgccttctttcccacaccccggcaggctgctcccgaatgctgcatggggattccagcttgtaatgccttctgttcccctgcctgctttgaaagtaaacccccttctctccgcttccctatcggggctgcacgtagagcatctaaccgcatgttcccggaacctgggatgcgcgcgcgcaaaggagcgcccaagcgtgcaacccagagtttggacgcgccgccctttacagcccccgccccggggccgggcgagctgagggggcgcggggcgtctgtgttcccagctgatcacagaacaggccgatatcgcattgacccggggagctgaggtgaagggccgctgtggccacagccagtcggagctgcaagtgttctgggtggatcgcgcatatgcactcaaaatgctctttgtaaaggtaactccgagcccagcgggcagaggggccgcaggctccgcgtgggtgtgggaagtggcggcccctaggtttaagaacccagacgctgcggggacgattgaagcgcacctccccggctcaacaggaaagccacaacatgtccaagggacctgaggcgacttggaggctgagcaaagtgcagtttgtctacgactcctcggagaaaacccacttcaaagacgcagtcagtggtgagtggaggctggcatggctggggagggagcctgggaactcgcagaacaggcttggagagagaattcctcaaggttttggaaaccgtcccacgctttgaggtcccaggccaagtcttccctcggcttgctctttagggcggaagaggcgggagcgcccatgagtcttctgggtctcaggccttgtagatccgccaggaaccgcaggcgtggggacccaaacgtcacccgtggcctgatcctagataagaagtcccttgaaggcctgtcgttccctggtgcttcaaaacgacctcttatgatttggcctttgaaggaccacggagaagggcaaagctgcattttaattttcttccgcatcctggttttgtttcttatgcgctaaaactgcaagggggcagtgcgactttccttttcagtcaggatgtgatggccttcagtgtctttttgcgcatggcagcatggctcgcacgggatattcagtcatcgactgcagctacctgacagtggattctgcaccatgtataatttactagcgtttctggcccatccctccgacaactcagccagatcctcctcggcaaaacgagcgttcatcccccaaataacaatattcctatctgcagacaccgtcaaagaccacatttaaatttattttattctttataagttgtctatttcactcataatgaggcccttcatcacccaggcacctgagttgggaaaggatttttattgaatacataaaaatacatgtgtcatctttcccttttcacccctttttgttatcacagtaaaaggaggattttttctttttcatcaaagtttagatgcaagatgtcccccagttaaattagaccaaaaaggaaaaaggaaaaatcaaacttaggtcagaaaaagagcaatgggaggcagaccttcagaggggatgtatgtgtgtaaggacaagcatccagaggaccagcaatctgtccggctttgttgaggaagatgttttattctttgccaggcccgtgtgaaatgtggaaaaccaagtcactgttccttctgtgtctttggaatctccattattagggattttttttttcttttttgaagtgcggtctcactctgtccaccagggtggagggcagtggcaccaccatagatcaccacagcctggagtaagctactgggctcaagagattctcccaccccagtttccccagtagctgggactacaggcatgtgtcaccatgccagactaattttgtaaatgtatgtgtgtgtgtgtgtatttgtagagacagagtctcactatgttgctcaggctggtctagaaatcttgggctcaaacgatcctcccaccttgacctctgaaagttttgggattacaggcaggatccaccatgcccagcctaggttttatacagtaacaagggttgggtttttaagtatcattctcctcttcaaaaaaggagttccaaattaatattgaaagagccctggctctcaagataatgggtgtgtttgtccttcatcaccacttgatgccatttgtagagccctagccctggcaagggaacagagaggacaggaggggtgtggtgtctggaactgagaggcaatagccagctctctggcacattaggttaggaacaatgagggttctaactattgctctgggctcttgctgtagctgggaagcacacagccaactcgcaccacctctctgccttggtcacccccgctgggaagtcctatgagtgtcaagctcaacaaaccatttcactggcctctagtgatccgcagaagacggtcaccatgatcctgtctgcggtccacatccaaccttttgacattatctcagattttgtcttcagtgaaggtaagttgttgggggatggaggggaagaagacctagtttatttcaggaaggatgagagagggacctaccagggccccaggatgttaccacttggatttcctctaggttgaaatgacactgcctgcctctttaataattttcaaagactaaaaaagcagtaagctgaatgtatgaacttatctcagtagttctttctttctccctcccagcctcctccccgtttaccttcactttagtcctttcttctcagtctccctttgtttcctccttcttcttttctttaccttcttccctcccttcttatatttcatctttccctctctccccatcttctttcctttgccaaaagatgaaccttcatagggagaaagatttaaaaagtcactttggaaaaaactgtaattttgatgcaaacttcccaaggagaaagcagctaaagtatttaagacgttagttaatctagagagctacagatgggggaaagggcctttgcctttctgggcccgtttcttcttgttctctcggatacttctagttgaagattctgctgctgtgagtccgagtttctgtgcatccagaaggcagagggggtgggtgcgtatgcacagatcatggactcatcaagtctttccaccaagcatcttcgtgaggaggatatccttaagctccagggagggaagggtacctgaaggctgagccgtttaaggccagctgcttctgctgagtgtggagcaaggctgtctctcagtctgtttagcctctgaaaggggacccagctgtgctgtggcaggttcaggtcaaacacattcttttcatctcagcacccctgcagaggtagggcacaaggggagtcaaaacctctgcaatttgttcaagtcaagcaacaattcacgttgggcaattgtgggataaatgaattcatatcatttattctctctccctcacaaaggaggttattaaattttatattctgtttattctacatggaaaaaaaatcagaaaaaattttgattgctttgtttatgcctttctttgggttggagacccccaggtgaatacaacaatgccaatgttcaggatattagagaatctccacctttgtcatctatgatcattttccaaggcatctagctttcataaaatgcagcttccactcaacctattccagaatagaatgcaccaccttccaccttgattattgagaaggcatttgagaagtcctaagataaattgtctttaagaaaagacaggtggaaggataggctatcccatgttaatgtattttctacaaaattgaagctactaaactgtgtcgagaccttaacagtttttaaaaatctttttgtttatggaagcatttacaaaatgtaacagtcagtgtctctcttaaactgaaaatattaagcataatcaagtataatttgacttcttatgattattgatgacaaggaatttattatgaaaataattggactatgtaatgtcagttcctagtccccaggaccctgccataaatgcttttgagtttatatgggtactcttaatagtttatgactttctagtttttgctgattagctgttactaggcgcttctttacttcttgttaccactggtgctataattgctgcttcttctagctccttaccattctgtgttatttttaagtcgttgtttatagttgcctatggcctgagaaatcaaacctcatagatttttagaatggtgtataaagtaagaataaataagtactgaataaggagcagagctactttcctaaaaatcagtacaattcattgcatggagtaaatggtgtcttttgttttaaaaccaattttgatccacttaaaggtcctagatagggaaggctgctgggtagacatagagagtttgtaactacatataacttcctaaatgcaaatagagaagtcacaatcaaatggcacttgtctcaccccaggcttttatggctaataattaggatgttctctcctgtatggtgtccccaggcttacgccttgacattcctgggaggtggcaagcctcattcagaatcactcactggatcagtgtgcctttgtgtggctgcgtttttttgttcctggctcctcccttctgttcctctcagcacctgccccgactttgttttgtaagagatcattattttcaatttggtggaattttaaagattccttttgggtgccttttcgggatctatcactgggcctttatccccagaatacaagctcaggggcctttcggtgtgtgcatgtgagtggagtatgcttgcatggagaaggaatatcacgtcatatatctgcacacctactgcaggggtgtgtccgtgtgttcgtgtgtgtgtgtgtgtgtgtgtgtgtgtttgtgtgttcatgtgtttggaccgtggccattgtcaagcacagcataatggtttcctgtgaagagtctattccctgtgtaagggggtcatacctggcactcttcacacctgtctactgaataggccttatgagaaaatcaaggtagtgtccacgaagtcggtaagtggacactcacaagggctgagagcagcccaaatggaggttgacatctttatcacatgagtccctttagtgcattgtacttgactactacactgacccccaaacaaaactctcttagcccagcaatgagctcatgaaacttcagcttcaatgtgcaatgactgtggtgatattgttagcacgcagagttggttcacttaggtctgggagtgggccccaagaagctccattgctagcaaggtctcaggtgacactgctggcccatggagcactatagagagtttgaaggattaaaggcacaataagcttcattgggtgacagttggaaagggatttgtgagaagggaagcccctcacagcaggagactgtgcagagggaagcttatgggaccaccattcagaaaaggaagaggacaagggaatgcccaaagcagaggggctttggagagggatttatgtgtccaggtgacatctgctcagcagcacagcaaggagtccatgggtcccagagcttctagaggcagcagtgccttggagccttagaactccaaggccctgtcttatcaatgggtaacagctgttgcatgaggtttcaaggagtatgcaaagcaggcaggctccatacagctgcaaattttcttgtttaagctattttacaaataattggatgtgtaaagatttgggagtttggtgccaacaggcttttgagctaacagtctcagcctgcagtgaagaaataaaccacctagaggccaatacacagaggccatctttggctcatttatttaccaaatacactttgtacagcaactatcacctctgcaatagaagctatcacccctgcaatctgaaacactctgtttctcatttggggctgattaccttgttcttccacaattaatttctgagggcctcattcaaagtcctgcaattcccttggagagccccatgtgatttctggctgagatgggaatggggatgtgtcgctgggagggaacaaaccagtctgagtattctaataccttgagtaaaaggaaacttttatgtattatgtcagaaaaaatataatagaataggaaggctacctctatttccctttattcaggattcaggtctatcaggcatttaaaagacatcacatatagattggtccctttttaattctctctcaaggggcaaacataacaaaacaaaacaaaacaaaaagaaacaaaacagaactgcagaaagatactgagatccccatttacagtggagcagctgagacacagggaggtgaagcgaattggtgaaggcttccctcctagaacctgtctttgggtatcagaggttttgtccttagtatctcagggccacagctgctcctgctgagtagctgtaatcaacatgtgagtgtgagaggcatttacagagtttgttgggtacccccaattcatgagctttttattattgttcctagcatcatgattgggagacgccacttaatctgtattttacccagatctgcgggaactttagtgttagtgtaaatgaacatggctgacatttctctatataccagccccccagtagagcgtcctgtggcaagctgtcatgtcacaaatgcatgaagggtttgctgatccagagagttttgtagacctgtgacttacctggcacttcccagtcaagaaacatgccaccctacatagttggtcctcaaggcctcctgagtaagcagccaacggtaaataatctgttatgaacacagctgagaactgtgttgaggactccaagatggagccccagccttcggccatggagttagccagtcatagaattctgtgcttcggatactgtcctctggagagagcataagatatgcctcagaattatctcacctgagggtgagcaaaccagtgtttacccaccaaatgccatctatcactgatggtcgctgtggaagcattaactccctgggacttctgacctactttgtagtcaaaacctgttgggatatatgggactggtgaatgccaaaagaagaatggacagtgtctgtgtccactacacctaggtactgggatataagaacattttctgccacactgaaactttcagtctagtgggatagggtgtatacaatgcatgtcatgttcctggcatacagtggcatcaaacaatacttgcacttataatttttttcttctctaatacttaaatcttttttttttttttttttttttgagatgggagtcaaggctggccttgaactcctgggcataagcaatcttcccacttcagcctcccaagtagctgggtggtgatgccactgtgcctagcaaatgcttacatcttgatgagggtatcagcttgtctgcagtcaaaggtctccaaagcccactcatcttaacagcttctcagtatacaaaatatattttgctgatgttataggagtccagggccagcacagggaacatatggaaagagcgtcaaaccctttctctatcttgccctgccaaacaacaggagaagcacagccagcagaaagcttgcccacctcttcaaacagtttcagtccatggtgctaggagagcctgaggaagcagagagcttgcctctgcttcccattgcctatcccaatgccattcattgggggtgcaatgaagcgctcttgtagtttatctcagggagtcaatataatttttaaatgctgtcatgaaataaaacacatatctagcaaccagcacctaagataaattatgattttagtgggtacacttgggttaagagttgaggagacttttgttggcaactggcagctggcaacagattatgcatttattgtttgttttgtcttcatctggttctttccaatgatgaggctggtttttgtctcttccagccacaagccacttaccctgttgtgtgtactctagagccctgagtccaccaagagcaaaggcatgagggatcctaagtcctgtggaggtggatagggagtcaggggttcagggaggtctgaagccagatgtagtccgggctaagccaacagatgctcttctccctggcggaagtcagaggccttccttgttttgtaatctgtgggttgcataatcagtttacaatacaagatttttaccctggggtatatatagtttatagatagaattcagaggaaaaaatttatatctttattttcactaacttctgattaatatttagcattttctttgtttataaatgaaggtgacagaccacagtaatattagcagtacccgtgactgtcaccaatagaaatcataggtattttcatctcactttagtttgtgcagatcttgcaaagtaacatttatgcttctcactgctttataatcatggccaacatatatgtgttccaataaggaaatacatatattgctgtatctgaaattcttttaaaaatatttgatggctgaatttcactttcccttgtaattgtatgtattttattttttattcattcataaacattattccgagaaggggtccttagttttattatacttgcacaaaaaagattacaaccttttcttagtaggtcatgagcagcattgttttaaatgaaacagaatagaatagagcataaattattagatgcataaagcaaggataactattgtttgtcaaacttctgctttagttctctgcatgtacatatgctctaagctgccatgtaaaatattgtttttttttttttcccgtgggtcataggcagagattaaaagcactgtcttaagcctgaaagagaaaagcgtgccctgcttttatgggttcataatccctcatctaaaacccagatcgaactaaaaaaaaaaaaaaaaaaaaacaaacaaaaaaaaccttggtgctagatggttttcagaattcagaatattttagactttaggaagactatacagtgcacaatttatatattacataagaccatggaagagtcagggcagccccatgcaatcaaacatattaatatatctgtttcctgcggtgaaacatgtgaaacgtcatactaagtaggatgactgaaaactacaagcagcctcacattagacaaagtcaggttttgctgccaaacaagtgattacaaagtacttttggttttcagagctttgtggattttgaaacagtggatgagagagtgggctcaggaattcctttttatttgaccacttactgattaggggttggtaagtgcaggatttggtagtagctatgatactttttgacatcttcatagttgatatcctctttatattgccctttcctgtggtgtgattaattctatttttttttcctaaagcaacaaaagataatcgtctgagaaataaatcatgatagcattctaagcatattgtctttctctttctttaccatactatatcatcttttctctaattttcttaaagaatgggatgtgagacattcttttttattatcaatttagaaataatacttttggtacttgagctccaaagactcccatatttaaaagaagtacacagaagacttaaatgtataagacttctatctttatagtgaacaatgacagaaaagctactctgtgccaggcactgtgcttggccttctgtagtatgacgttggatactcacagcaaccctgtaaattaggtgtcatatcgattttacaggaaactgaagcttagtagattaagagattcacccagggttggacagtggaagatctgggatctgagcccactatcatctctttctctcacaatgttccattacatctactccctcttgatgtgatgatctggatctatggagaccactaaaagttcatgtatatctctatttctacagctatatctaactatatatctgtttattcattgctatggtataaaacaagagaaaagagaagacatgactttacaaattggtcaaggtcgtttggtgccccatccccagattcttcccaatccaactccaacctcccttcctcctgaagctttgttaactccccaccctccctgtcctgaatacttgtagttggggccacacagaacaccacctgtccatgttctccagtgattttgctacataagctcttgctcccagacacagctctttctccattgcctctcccattctgcctaggaaggtagatgttgtatttcgggcttctggctgattgtttgcctgggtaactagagtgtaagcaggaagaagtgagctaaaaccatggtctacagtctgggtaactatgaaattgctctgcaggggagagagttaagaagggaagagacagaggctagagccacaagggcaaccttgtaaagatgcctggggcctactcaagtagcagcctggaaaggtgcatagatgagagtctgaaggtcctgagggctttgctactttttgtgagataatttattttttatttttactgtttaacacagacttagccttattactaaataatttgaaatcaatgtatttcttcttaatattttaaaatttttaaaaattctttgtttctattcaatgtattgtattaagtaagaaaaaattgtatgaggttgccactagcgcctgcaaaccaatcaaaccctgcaatctgtgttaacattacatgggcaacagagtgttatcatgaggaaaataaataacctttgttgttaacaaaattcctaccccacgtgatccatttctattcattgttctctttaaagaggcaatatggtatcatactggcgaagaagaccgccatgctggcatcatgaagttctaggcctgccactctttctgatacactgtgtcatctcaggtcctgtccctggagcaatggatgtattgatccaggctgaccttcaaagtgttgggactcattagaatggaatcaaatagtggggggaaaagtttcctgaaaattctttttcaaacttttggttgtaataagaagaaaggctcagtttagtcctaataagtccttaacatttctctaccatttgccaaactatcttttaaaaaagctatttctagtagaatttctttttctattatatatatgtgtattatatagatacatatacatatgtgtgtgtgtgtatatatatatatatatatatatatatatatatatatatatacacacacatacaaaacagttgtatttaggtacaattgtatgcatttaagcatgtaatttagtaaatatcaacttatgaatacacctgtgaagccatcaccacaatcaagaaatcaacatatccatcatgctggaaaacttccttgttcccctttgtaataagtatccagctcattgaattttcagatgctagatgaacctctgcaaccagcatgcagatcaggaaaccgaactgacaaatcctcctttctgctccaccttgggattctgtggccttttaatgccagtagtttaggtctgttaagtgctgccccaactatagtgttaagttgtttgagttcagatcaggcttcatttactcctgggcaaaccacttattatcgttatgacttgattaccttatgtgtaaaatgagtataataatattgtgtacctcagagggttgttaaccagataatctttgtgcttagaactgattgttaatttagggactaagaatgtcaagtatacagctatcaaaggctgtatatgtgaaagtaagtctccactaattgttattattagagaggaaagctcatcccttttcatttctgctgatctcaggcaaggtgagagaagggactatgtcaatagggattctggaggagactggaatacagtaggtacttaataaatgtttacttggtcgtctggacttaaaaaacttggtgtttatgaagagacatgtaaagcttgtttatttttcacttgtggctcctgattttggttaaaaggccaccagttacccacaagaagcaaatgagcctgttctagtttctaggaatataattctggttagcctgacaaactgtttgaccactagaagttctcccaagaatagttttttgttgatggtggttctatgtaaaaaaatggagactcagcactatgaagctatcttgaattttaggaggctgaaaaataaatcaacactgaggtgctgctaacatttgtgttcttgatctagatgctggttacatgagatgttcatttgtaaaaattcatcaagctctacacttacttaaaaattatagcataatttacatatattacatgcacccttaatgtttatcccagcattattcacaatagcaaagttacagaatcaacctaagtgtccatcaacagatgtatggataaagaaaatgtggtgcatatacataattgaatactatttggccattgaaaagagtgagatggtgtcatttgctacaatgtggatggcactggaacattgcattaagtgaaataagccagatacagaaagacaaatattgcatgtattcactcacatgtaggagctcaatagattgacctcagagaggtagagagataccagaggctgggaaggatatgggtgtgtgtgtgtgtgtgtgtgtgtgcgtgtgtgtgtttgtgttggggagagtggactaaagagaggttggttaatgagtacaaacatatagttagataagaataagttctaatattcaatagcagagtagggtgactatagttaacaaccatgtgttgtacatttcaaaatagccagaagtgaggacttgaaacattgtttacacatagaaatgataaattctggaggtgatgaatatcttaaattccctgacttgatcattaaagtgtatgcgcataacaaaatatcacgtgtcccataaatatgtatgaatagtgtgtatcaataaaaaataacaaagtaatcaacaaatctaaaatgtatggtttaatgctttcgtacttatatttgcaaccatgtaaacatctcctagatcaagatctacaatatttccaacacaggtgaaagttcccttgttttcctttccccagatataagcacattctgacttctatcaccacagagttagttttacctgctcttgaacttcatataaatggaatcatacagtatgtatacactccttgtgtctggcaattttctgtcagcataatatttctgagatgcacccattttgttatgtgtagccatagtacattcctttttattactgactactgttccattatatgaacatatgccacaatttatccattccattttgatggacattttggttgtttccagttttaggctattatgaataaagctgctatgaacatttatgttcaagtcttttcctgttgactatgttttcattttcctggggtaaatgcctaagaatgggatgctgggtatgtttgtctttattagaaattatcgaacagttttgcagagtggtcataacatttttcaacaagggtgttacaagttcctgtcattccacatcatcaccaacacttggtattttcagtctttttgaaacttacatatttttatataatgcgttatgtgtacatattactttaataaaaagttaaaaatgaatcaacaataaaaacaatgatgattgtgtctaatggtgaaactctgaacatttaaataagttatctggatgttttgttgacatctgccaggaatccaataattacatgttgtcctagttaattgatgtatttttattacgcattatgtagaacgattaagtgttaacctaggggttggttagggaaaactatttctgaaaaatagtcccaaagcttccttgagaaatctttttacctccatttccctttttgttttgtagaacttatgattcaggatgttttgaccagagctctctgcttttcttctttcccattgcagagcataaatgcccagtggatgagcgggagcaactggaagaaaccttgcccctgattttggggctcatcttgggcctcgtcatcatggtaacactcgcgatttaccacgtccaccacaaaatgactgccaaccaggtgcagatccctcgggacagatcccagtataagcacatgggctagaggccgttaggcaggcaccccctattcctgctcccccaactggatcaggtagaacaacaaaagcacttttccatcttgtacacgagatacaccaacatagctacaatcaaacaggcctgggtatctgaggcttgcttggcttgtgtccatgcttaaacccacggaagggggagactctttcggatttgtagggtgaaatggcaattattctctccatgctggggaggaggggaggagggtctcagacagctttcgtgctcatggtggcttggctttgactctccaaagagcaataaatgccacttggagctgtatctggccccaaagtttagggattgaaaacatgcttctttgaggaggaaacccctttaggttcagaagaatatggggtgctttgctcccttggacacagctggcttatcctatacagttgtcaatgcacacagaatacaacctcatgctccctgcagcaagacccctgaaagtgattcatgcttctggctggcattctgcatgtttagtgattgtcttgggaatgtttcactgctacccgcatccagcgactgcagcaccagaaaacgactaatgtaactatgcagagttgtttggacttcttcctgtgccaggtccaagtcgggggacctgaagaatcaatctgtgtgagtctgtttttcaaaatgaaataaaacacactattctctggcctttggctgctttcttgaaacaagaaaacaaagctaaaatggtgtctttggcgtccagaagagaaagaggaaaagatgaagacggattttgcatgtttgcaagaggaaaagtaaagacagggcaggaaaccaatgagggggaagttggcttttctaggtgaaaaaaacatggatttttttggcaaatataaatagttttaataatggcacctcttgaccagttggcctaatattgcttctgatgcttcttggtcttgagtttggcatttcactttggattaaaaaggtgggctggacgtagtagcctaagttgacttctatttgaaggaaaattcctagagaaatgcacatagtttgaattcattcactttctaaataatcatttttttcccagaatgtccgagtgggagtagggaaaaatcttttgtctggttttagagtggaactctctccctccacatatacagtctccaccatatgagaggcagctcatgaactcctctccctaagtcttcaaactgctcacaatagggtatcctcagaagttcattatcccagcaatctcaccaagtatcatccagtttctgtcctatttcccatttgtttgctcttctattaaccacaatcttcttgtcttcatgatctctcttcagtgtctgcctcttaccagtgagggaaaatctttaattcctcctaaaatttgcatgttgcacaaggaaaaaaatacctttggtgaaaactaaaagatggttaactccattcttatactcatctgtgatctgtgatcttctcacccacattccccaaacttgacaaaacttttcctttttagcatcccagtattttctttaaacgttgtattccttatttggacccatctgaatatctaggggagaaatggacacttagatttatctgggacttcacagtgagttaccattcccttctgcaaccgttttgaaaaagaaatcttaaacctttctgagtcatatgtctgaaaattcccttctgtgtatgtttttctttaaacttgctttcacaaaacataaggcttattattagttttggaattgtcatgtaattacatcattgttatgtaaatgtacataacacctactattgttttgtgcacctattgagtacaggctccgtagtgcctataaagtaataaacttggccttagtttctctagggaaggactgacaagagaacaaacaacatacaacaaacatgtcattctcaaaatgtcagagtgccctgaatctttagaaagtgttgactcatgaccacatctctgtgtctcagctacttcaatctttccagaatccaaataacagtgatttttccacaagtaatgtgcaggatgtataaaaagccattattacgattactgttatgattatcaatattgtttaccatgtaatttttacctagctatttaaaaattatatgtcaaactcagtctagttgcctttgaactgcaccttatttctctcagccatgtcttcatctttatcatcaattaaacacgataaaggggagcctcatgacatagagcaggaagtggtctctggacacgtctgtgcctggcagcctggcattctcccagctcagggtgtccaggaagacggactccaccccaggcctcagctctgggccctctccatactcattgtcattgccattgtcctaacattttgcagctgctcctgggccaggaatagcctgaggcaatggcccatttatctgcattgcttctcaagcttcagagacagggaagaaaacatataaaacacagatgctcaattaccccttgaactgtcatttttcttttttactgggattttaaacacaaatgcctgtgggcacaagaggatgttgggcctggttgctgggtatgcctgcctggaaaagccaggccagatggaccatatgtggatttctcttgagggagggtgactttgatttaaattcagagcatggttctttgcaggattccctcagtcccaggaaacagttcccagtgaaacagcctcagaggggcagaaagcactcgcttatctggagcctgagaatgccctccaaaccatcatctctctctttttgtcaattgtccaatctttccattagcaaagccttggcaaaccacatgggtatgggaagaaacatctgagaaatgtgaatggagaaaggggaggaaagatggtaggagtgacctgcagcatctgggtgaagcagactgctgcatgtgtaggggtgggttttaccaggcaggtggttcaaactggcattgtgctcaaacccttccccggaacaaacaccaagcaacctgggccagagaaagctttaaatcgttgtgtctcaaagtgcattcaaaggcacgctgtattagaatcatcctaggagacctttgaaagatgttagttctagggcatcatcccagacattattttgagaatctctgtggtgaggccctagaatctgtagttttactctgctccccagataatgttgatggagaaataagaagacttctggttaaaaagcctctactatcaatgtatgtgcaacattatccaaattattaggcttctctgggttcatgttttttcatctgaaaatgaagcttacttcattttttttttgaggactcatgaagcacctggaagtccctagcacaatgcctgtcacattggagagactctctaaaaattatcattagtggcattttgctagcacaattcttaacacgtacgttcaaattttacctgccaaacaagaggtcacgaaagattcaaagggactaatataagagttttagccaggcgcggtggctcacgcctataatcccagccctttgggaggccgaggcgggcggatcacgtggtcaggagatcgagaccatcctggctaacacggtgaaaccccgtctctaccaaaaatacaaaaaaattagccaggcatggtggcaggcacctgtagtcccagctactcggaaggctgaggctggagaatggtgtgaacctgggaggcggagcttgcagtgggccgagatggtgccactgcactccagcctgggcgacagagcgagactccgtctcaaaaaaaaaaaaaaaaaaaaaagagttttaaatctgacttctacagttttctgtgtcaatttattttggattcagagaatttttatgcagggattcccctccaccccagttcagtaaatcactcaggggttatcagttttgggttgaggggatctgtcagaatttatgaacttggatgggaaaaaattatacctccagtttttactaacctcaaatgaaaagtagaatttctttcagtggtgaacatgggcattaaaccactgcagtataagaagacctgtgaatttgtcatcaatagaaatagccacattacacttgccagctatatctcaaaagaatcatttatactcattactttgaaattatggtagttatttgacccatcaaaagatcttgttatttaatgcattatagccgcattttaaaattgtgataatgatactttaatcttttttttttttgtaagcctacatattttactttatgcattttaaaaacttttctgagaaggagattataagctcagacagccaagagggtccagggtcaatggtacttcagctgtcatttaaagtgacagagcctgtcaggttgtctgctgggaaatggtttacaaaggcactcatgacagatgagataataagtatttcttagcactgatcttgtgctttctagacgctgctctgggtactgggacacagcagtgaagaaaatacataagaactcctgccctcatggaactgaaatatgtggggcgtgtgtctgtgtgtgtgtgtgaaagtgcgtgcacgtgcatgtgtgtatacctgtctatttaggtacagtttgaggatcctaaatctgaaaatctgaaatacaaaatgcttccaaattcaaaactttttgaatgttaacatgatgctcaaagaaaatgctcgttggagcattttggatatcagattttcagatttaggatgctcaattggtacgtataatgcaaatattccaaaaatctgaaaaaatcccaaattcgaaacacttcttttggttccaagtatttcaggtaagggatactcaacctgtattatgattaatgtgctgtcattacctaactctttggggccttggttaactcagcctaagtgaatcataagatcttgtcttttctagctttaagtttttagaaatgctgacaatgatcaggcttaatgatcaaaacatttgtcatgtgagaaaatcaggataagaaatttctttgcttttagaacaatatattttgatccagaaatcagcaacccatagactttctcatgtactctttttgtctttagttaggtctatttatgtaggagatgctctcagggtcccactcgtgttccctcatcccttcctggaggtcatttgctgtgtcaattttagcaaagggaacaaactttgcccatgtgcagggcgaggagagttgatgctgcaggaacaattctcatctaatgatggataggagataattaaatataccagtgcccccctcaagaaagacaattctcaagtgtctctcagaaggtcaccaatgggattgagccccagttgcctattgtggtatcccattcattaaaacacagtttcttgactttgttctctttgtcttatttcttcactctgccatgttgaccttcctgggatcatcttccaaatgaagtatttgtgtctaagtctttattcaagctcttcttttggcaggacctacaccaagataatgtattcatttgacttgaaacacagctcaatatgtacacatttcaaggatcaaatggactgattttcctgcacagtgtggattggtactgtgtcatgtcactttcacaaaatttctcctgcttgcacattttatatctgcttcagatcaatttgatcttttctctgcctggaatttcattaccattttttttgatgacagtgtactgttcatttgatcagtttgatcgagcagtctgaactcattgggctgttaacttcatggtatgatttacttttccactgattgctactaaatgtgttcttccccagggataaaggggacgtgactgccattcagtctgattccatctgtctagtctagtttaaaaatcaatctcattctaattcaaagataatacatctctcctttgctcaagtgaaacttctactagaggaagaggtagcaactgggaggcagtgcaggatacatggtgtgctcttgtattccccctttctttctcttaaataccttcttcaaatcatggggtctcacactaacacatggccctattctatgtggactagtggggagcggaggttccagtaacctagctggctgtagtcagctgccttggagatgctattggaggaaagggagaggcctgagtctcattttggttccactgaaaactacagcttctgctgttcggagtggtctttgtgtagatgacatatgtggtttttagagtaagggtcagctccaccttgaccctgtctccatgcagaaaagcagccatatttcccttcagttgcccccatggtgcacccctccaaagcactctgcaagttggacatcctgttacttagttaagtggtttgacacattccctgctgtcctctccatgtcccatcaaacatactcaagggaactccatgtcttcttccatgcccagtaaaggcagaggagacctgtccaggggaggttgcctccacctttgtctgccctgacatgtgatatacaatgcctttttttcatcctgctagctcaggctacttcctgagggtttttaccttccaacatttctggatggaaaataggctgtgtatataaaagttcccccatcctccagcttcacgagatcaatgttaatgtcccccttgtctcccaaagtggaggagagagcccaaattatcttctaggctcccagagagctctcaacacgacctcttgaatccaggttctattataaatacacatgcacacgtatgtttattgtggcactattcacaatagcaaagacttagaaccaacccaaatgtccatcaataatagactggataaagaaaatgtggcacatatacaccatggaatactatgcagccataaaaaaagatgagttcatgtctttgcagggacacggatgaagctggaaaccatcattctcagcaaactatcataagaacagaaaaccaaacaccgtatgttttcactaataagtgggagttgaacaatgagaacacatggacatagggaagggaacgtcacacactggggcctgtgagggtgtgggtggttaggggagagataacattaggagaaatatctaatgtaggtgatgggttgatgggtgcagcaaactaccacgagaggtgtacacctatgtaacaaaactgcatgttctgcacatgtaacccagaacttaaggtataataattaattaattaattaatttttaaaaaagccctcagatcagttttgcatctttggaacagggaagtagaatgagagtcttcagccctgaacctggctttccttgaacgtggccttccagaatttagtaatttttttttcagtagtggtatcgacatcaccatcttacactctttacaatccctagggatggatatatttgtctttacgtcatgtcatcacaatgttacatacaactttgtaccaactcatttgcactccccaagatcacaaagaaatcattcttggttactcaataaaataaatttgagaaatcactgtttccaataacacaatggggaaaaggcaaacatttatttttatttgcaaatgcagtttctgccaatagttagtgctcacaaaaccttttaagctacagtaacttttggtaaactcaatgaatactttaaaaaatacccgatggtaagaaaattacagaaaaatttccattacactgtcgaaaatgtttggaatccaaaatccactattttctgcaatagtttttaatgtttattctggtttaaaaaagattttctttttcttttctttctacttctacatagtcctggttaaattaatacaatctgtctcatgaacatttaggactgccattttctggatttagattgtttttattctcacatatttatattaatgctttaatattttacataaaacattgatttgctgttttatgaagcaaaatcatagatcatatttatggaggcatttccagtttgaaagaaaactgaaaatctaatcagtagaaggtcattttatgccttttttcctttttagcagtgataaataattagcaacctattaattacaaaaattcttaattatgcttagagcaaccagagcgctatcacaaatttaaattcatatttgttacagtatgtgaaatagttaagaaaagcctctgttttcccagtttggtaacaaatggcttttgtctgatgcataattaatagaaactaatgatgactatgtagctcttccagagttttaaaggcaaatctatattggcctacagttaacatgcaaattcatccaacaagcaacacaaaatgtattgtagtagtcattcatttttatcaacattcaagaagatctagacagcagcacgactctcctatgtcggaaacacattataacatgggcacaactgaagtcagatcatacctggtaaaataccctcttgctaattcatcctctagagtcagttcagacttccagcacgatacatgaacaatagcgattaatactgtggtacaaaggtaaatatagacaagagtttggtgtgctagcatacagagttttaaaaatggtgacaaatgaaaccaaacgtcttgccctgttctctcctctccctttgtgagcctggaattctcatggtctcactgaaacattctattttgggaactgaatccaatgatcctagcactgaaattgctccctgggagggaaatttggccacaagggaacattgtacccatttgagaaagggcactgagggaaacattgtggtgtgcaaaagaatggtttgctactagaggcgttcatggaaaatgtgatctttaaaaatatttaactttatcccaaggagtggtatactgtggctcaaattttatttcattatttttggttggattaatgaaacgtgcacaccatcaccatcactcttaattcttcttccaccaaataagacacttgttaggataagaaagagattttactaaagctgacggtgattgagagtcattcagtattcaaagttcctaaagaatcattggttctcttaaagggataaaaaagtaggaaaggctttgttcaaactcctctagtaaacaagtattacttcaactgatacaatggctacatgacatcaaagtactataaattatcaaaactatcgtacagaaaaattacaaattcgttgcaaaatacattatactgctaccattaagaaaaaagtgctttttgttttcctttctttcttttttttttttttttgccagaaaagtattctttcaatatagaaaatcctacatgttaccctgcatgtggctaggatatatcataacggagtttgtactgagtccttctgatttgctggatgaagggctgaaaaatataataatgacttattaaagccgtgctccaagtgaccacaccggctgtcagtggagagatgcctgtttaagacacaagaagatgccctggtctgttgaaccctgccggtcatcacgctgtcccaccaattggctggtctagaatgcacaggccttttgcatgttctgtgtttccttttgttctcctgaattattctcatgtcctcatctagctttgccacctacacgaatcctctgctcagtgatgcctgtattgtctcatgagggggacgatgcaagacggtggacctgctagttttaagaatggatgtccgaggagttcctgggctgttgctctctgagagggctccctcaccaacatcaagtctaggaatccccggagcactgaagaaacctgtgaaaacacacagataccaatctgaggactaacacagacacctaacccagtccccaaaatgttttccccattcatcctatcaacaacttcaaattccagaaagttaccttaaggagaaagatgttgtgaaagcaaaagcatgtcttgtctttgttaacatttcgtgttttccttacctttttcaagtgtgaaataataggtgtaaatgacagctcaactaagaatgaaaacttatttactacataaaataacagtggcaatcacagtgataagagcagctattacaaaatatttagtatgtgcaggtgctggtcacacgtgcttgatgaagcatagtataaacagggagccgttttatttttctaacaactgcaaccacacaggctctgtggaacccctttctttaagagaaacaagcttctgtaaggatatcgaacacatctcatttttttctttgaaggtcttgtaattttccttttaaaggtatatcttactttatgtatatatttagagatgaggtctcactatgttgcccaggctcaaactcctgtgctcaaatgatcctcccacctcagcctcctgagtagctgggagtacaagcatgtgccagcatgcccaggttccgctgcacaaatactaagagtgtggctcaatggatttttacatacatttacccctatttactttccactcctatcaagatatagaacttttctaccactctaggaagctacttttaggtttccttcctgccaacccctatctccctgcaaaaggtcaccactattttaatttatagcataacttagttttgcttacttttgtactttaccaaaatggagtcatatatttgatttcttctctatctggcttctttcactcagtgttgtatctgtgagattcatctccgacgtgtggcaaaagttatatcttttaaattactgtgtagtattcactgtccaattataccacacattatccatttgggaaacaacctcggactggtttccagtttttttgaaaccattaggattaaagttgttcttgtacatggttttgaagaacattggcactcactgggtgtgagactactttcatatgatacatttttagtcacttttttttttttttttggagacgtagtctcgctgtgtcacctaggctggagtgcagtggtgcgatctgggctcactgcaagctctgcctcccaggttcacgccattctcctgcctcagcctcctgagtagctgggactacaggcacccgccaccatgcttggctaattttttgtatttttagtggagatggggtttcaccgtgttagccaggatggtctccatctcctgacctcgtgatccgcccacctcggccttccagagtgctgggattacaggcgtgagccaccacacccagccacttttcattatttagacttagtccaatccagtaaaaatttcaatctctctttttttgtttatgtttttgtaggtccacacaacctatatgagtgatgctactggggctgttccctaagatttaggggtgaggaaggaggagatattaccattacaaataattctcctccaaaaggcagccacacactctcttttattgtcataagataggaagagaggtgtgtatggggccagtgtttatagtagtagtcctgcagaaatgatcctctgagcaagtcctttggaaatctggcagctcctacagtggtgattcttggatgaagcatcattattttctgagctcgtcctaattggcaatccttggaaaacagaaaagaccccactcggtctcttacatgcattatattaaccatgaccttcattgccctgtacaatctagctcctgcccatctctctgacaagacctacctttttcccctttctgactttactccagcaatgtaagccttctttcttggcttaaggcctttccacttgatgctccccgtgcctgggacctttttctccaagatctttgcatggctggtaccttcttcctattcaggtcccagctcgtttgatccctccctagaaagggcttccttcactcttcagcttaaatcagtgatagggtttggctctctgtgcccactcaaatctcacctcatattgtaatcctcacatgtcaagggagggacttggtggaaggtaattgggtcatgggggcagtttaccccatgttattctcaagatagtgagggaattatcatgagagctgatagttttataagtgtctggcatttcccctgtgcgctctctctctcctgccaccatgtaagacatgccttgcttccccttcgccttctgccatgattgtaagtatcctgaggcctctccaggcatgtggaactgtgagttaattaaaccttctttatttgtaaattactcagtcttgggtatttctttatagtagtgtaaaaacagactcatacaaccagctttcaatcccttctcctgcacactctgtcacatcacagtatgtttttctttcatagtatgtaccacactctgaaattattttatttatttgtttgtttatggtttactatctgtttccccaactagaatgcagagtctagaccccagagtcagaaaagctggggtcatgcacggtgacatcccaagctattagatgtccccagcatgtaatagatgctgaatgaatgagtatggcatagagcacctgatttactcttctaaccaaccctttgggatacaggccaatcataacccattttacagatgaagaactttggcataggaaaggctgagtcacttgcccagtaaacgaatagaagaacagagattcaaacctaagtgactatttccaaagtccatgctcataaaccaggatcttcctgctggatgtggtaagccagtcttaaaaaccagagagatacaggaaaatccaaaaactattctgaactttagcaacagctgctgtttctcaccttgtgtaggtccttcactcttggaggtaaactgtcccggatcctccgcatcgcctggaggggaggctcattgaagtaggggggctcgccatcaatcatttctatcaccatgatcccgagggaccagatgtccacctgttaggcacaccctactggttatctcaggcaaggagaacattctgaaatgtcaagtgtgtccacagaacctcatactcattcacaagtgactatggcacttgtaacctctcaacatttacaatatagatttataggctaaactgctgggttaccgagtttttgctaacagtctttgccttttatggacaacttcagtgaaggttccacccatcagacataaatgaatattttaacattctaaagtttagtgctttcatttttactctgtaaactttagtagttaactgtctatcagggcagatgagaaaatcatccggtttaatgctatgaaaatggagaagaaaattgtatttaaaccataagcaaataagaaagttttgacatatttgtaacaaactgcaaagggctaccttgcaggatgcagaatatattctgattcttttattaatttgcttttaaaaatagctcttttctcccctactttgggatttccttccactaccttttattatcatttcaaaacagcatgcacaaaacctcactttacaaaagcattttcagggattggagaaaagaaaaggaagagatgacaagcaagtagtaaagaatgggaagtcgagacaatgaggagccatcactgtgctataaactcccagtcccactcactttcctgttaggaaagtttcctgttagggcctcattatacctcttatctgatgaacgtattgctattattaccccttgcagtgaccttcaccgagaatttctctctcaggaccacagtgagaaaaacaagttgaggactcatccaaggtcaagcaaacaagagaaagagaaagattctgccttaacttatgctgatgtccttagctcacggccatgtcttctcatgcttctcttctcccagattcaccatccacaccataaagtgtggaaacactatgcctagccgaaacataccccttggcttccatctgtatgtagccttatgtgcctctaagcttccacccatgctattacctcccaagaaggcccttcctctactcctctggccctgcattttcacatttccaggccctacctcttaaaagattaagagtgattgttttcattccagtggaaacagaaattgtgccatgtttttgactatgattcacatattatttttttcctatgagaaaacagtgtaggtccttcactgtgagatgtaaactgtgttgaaaacagtgggtcatttaaatatcacctctattttgtggcactttctttgatcctctttcctttctctgaattctcatgcctgctcatctgcatgtctccagccactttgcaagttgcattgccttgctttgtgtgtgtgcctgctactgagagtgggatcagagttggagtgactttcccacagtgtccactgtaggactgcaataaacagcccttggataaatactgcagtgatctgccccaggggtggccaggctcccacctgccacagcctatctactctgtgcctcatctagtgagtggggatcaaatgtggagctaaaagtcattgcccccatctcctgtggtcaccaactatctcagaaccaatgggtccctgagcctgtccccagtcctgccacgcctatgactgtgacccccttacctctgtcccataaggtagcctagaaatcacctcaggggccatccagtagggagtgccaaccaatgatttcctcttcggcacctctttggaaacttgagcacagaaaccaaaatcagacaactttatctgaaaaggaaaggaatgcaacaaactagcaattttaaaacaatgtctgctagacacgaaaatacaaacatacagagtttcaaatttaaaacaaaacagtctcatcaacaggccttggacatatcagaggagggactgtcagacccttttattggaaaggcatggtccattttaatggagaaacttctcccgggcccaccaggatcaacttccaaatgtctcaactcctgctgcttatattacttctataaaatgatggaacaacaacaaaaaatctttacaaattaaatacaccacaaacaacaaatttgttacatcccaagcctacaagtttaatataatgtaacaggtgatgctttcatatacataagttgctattcttaatatgaattttgaacaaactgatgtaatttagattcttttgagttgagcacatttagatttctatgtaccatgaggtgaatcaaagaaccatctcttttctatatttgaaatattgcaaggcctttgcttatccaggatgtggaaatgtcacttttagtactggatacccttccctttttggtttgctcctttgtccatgacagttgaatctaccaacatgaacatcaatgcaagtggaaacacaggcatagaacctgggtgttggcacttggttgtcaggggtttaaggtggtcatcctaagggctcagtgtatatacatgttatttaccttagatatcatcaaggaggaaaaaaacttggaaatttctttcctagagctcatgtactcttaagaacatactgcaccctgggtgttaggcaccctgctggtttatgaattctagatgaccgggattcagtttatttctggaagccataatttctagtcatgatgacctggtctgaacttcaaacagccttatgaaagtgacatcaaagagccacttagagttgttggtgataatagaacacaaaagaaaacaatggttcagaatgaccacttgaagtgaaaaaatttttaaaggtaaatagtacagtctccagggtatgaattctctcttaattctcttcacacctctctgaacttcctcttccaaccttttttttctggctctacctctgccgcctgcctcttaaatattggggttccctagggttctggtttcctctctcacatcttctcttcttagattctcttactggatactgtttttctttctatgcttagttcagaccttgctcctccattcaaagcctgtatttccaactagtgtatatttctaaatggatgaccacaagtacttccaaactcagcatccctctctctgctccaaaagctgacccctttcctatcagtcctgttctagtgaatgacaccaacatcaatccaagaaaatcatccttgactcttgtctctatctcaccccaagtcttcctggttagagttaaaaaaaaaaactatctctgtggcttcaacacccacaatagtgcttggcccatgataggttttcaaaatcaaaattgttgcataaattgatgaacctcaatcataagaagtgaaagagtccttggagaatgaagaacaagtgcattaatatattataaagatcaggattcagcagggaggtctgacccagagacaagattccccctgccacacatgttattatggtaatttccaaacatatagcaaagctgaaagaattatagagtgaacatccctatctgcatgagtagattctataattattaatgttttgctgtgtgggctttatcacacacctatctctctatccatccatctattcatctaatttttgatgcatttcaaactgaattactgacagcagtacacctcactcctaatttagcattaactggagttcaatgtgtttttttaacagtttaaaaatttacacagtgtgaaatgtacacactttaggtttatcatgtgatgagttttgacctcccagtactatcaagatctgggtattgccatcgctagggtaggatgagaaggtccttgggatatgagtggtagtgaaacccttgaagggccatagcatgagaaaagaagatggtcaaatatgaaatactgggcacctagggtgatcgaaattgaggcattacaggagaccgaagagaaagacatcaagaaatcagagaaacaacggagaataaattgggaaagccaaggtagggatagcagcagctaggacacaacagggagatgaaaccaggtaagaaccgggagttgctgttgtgctcagcaatgagggcatccctagtagcctctagtttcaggttgagtcagtggtggaatacagagagcagtcaggtagatttcagtcagagtgcttttcaagaaatgagatgtattttaatatagatagaagaaatccagcatttacaaacgtggtgaatatgataatgatgacaatgataattattactattctctacagtgggttgaatatctcccagaattcacatccatccaaagtgcagaatgtgatcttatttggaagagtctttgcaggtctaattagtgaaggtgaggtcatattggattggggacaggccctaaattgcatgactgatataaaaataggagaggacacacagacacatagataagaagaccatgtgaaggcaaagcagagactggagggatgagtttacaagccaagcaacactgaggattgccacaaccaccagaaaccaggagaaacgtatataaaacttctccctcagagcttccagaaggaatcaacactaccaaaatcttgattttggacctctggactcttgaatcatgagaatacatttcatgcagagagaagaaaatgccactcaattggtagcaatttgttatagcagtcctaggaaatgaatacactcactgagctcttactacctgccaggtaacactttaaacactttacatgtatctcatttgacagctcccaagaaactaacgaggtaggaaatattattatctccattttacagagaagtaagccaaaacacagaagtggttaggccactttgccaaggatacagagctagtaactggaagagccaggattcgggaatttaaccaccactctgctgctctgaagagcaaagttacaggctgaaagaagggagttcccagagtggtagatgttgaagaaagaggagagagtgaggataactgatgacagggtttttaaagcatcccttcaggagggatgggatgggatccaaggtcttgttacttaaagcatcatcttcatcaatagcagcagcagcagtgtcacctgggagcttgttagattttcagaacctcaagccccaccccagacctactaaagtcagtttccactttaacaagagccacaggctgttggtatacacattatagcttgaatcatagatcacagttcagtcaagaaacagaagagggaggaggtcacatgaacaggtggggataagggggcatttgtttgcacagagtctaatctctttagcatactgacaaaagccttaacattttcaccacaccccatcttcctactgctggcgcaaacacacgagtccacctgaatggtttttaaagccctctgtaatctggtgccttttcgtgtcgccaattttattcctcatggctttctgcacacactaaaaccattcctagggaccagggctgttcctagaatgtagaatatccagggctaaaacccagaaagttctgggcaaatcagaaagaggtggttatcttatggtccattcccaactctgagtttttttgatgatttttcttgcatattcaactcttaggtatacatcaagggctttatcaaatctaacatcctccagaattctcaggagcccacgttgatcactctctttttttttttaatttattattattatactttaagttttagggtacatgtgcacaatgtgcaggttagttacatatgtatacatgtgccatgctggtgcgctgcaccctcttttccaaattcagagaatttggcatgcactcaatcctgaactgttttctggtgctgattttccatctctagctagagatgacattccttggggacaacaactctgctttctgattgcagagccttactgtgttccttaagagttgggcaaacaaacagcagaaactcagaaaacaaatgctactagatttattttatactgacacacatacataatagtataccaggtgacagaagacacattgaagctctttctgaaaacatctgaagcacactgaagatagctgttgctagaatcaaaattggaacacagatgaaatgaaaataacattttggaaattattaatgtgattttttttcatttccttgttcatgatattctcactaattggcttaaggccagtgatttggaccagtggtggtacgatttgaattggaagggattagattattcccaaagaaatgctagagaagctggtttagcagagaggtgatattcacaatttcttatcaagaatcaaccccagaggactcagatcatagaatttcacatgtagtatgaaaaaaagggccttgtagttgtgatacgtggtccataatccatggtgccctattataagaggagtcgataatgcacagaagtaaaaatcctacagtccaccccttgtagtctgggataatttgcagaaggagagaaagaggagtgatgttgactatgtcaggtcccggcctccttatgatatatcactttttttcactccaagcagatggtggtgggctttggaaatatctgtgttgcatacatccccatacaaataagggagaggagaagccccacaagcatgtgttcagaggtaatattcaaaatattcaataaccagattaacgtaggccaattggaacctagatagaaagtcaagcaaagtcctagagttaccctgggaaggattaccatttttaatgaggtgaggagggtcttgggaaggggctggagtgatgggggatagcctaaggacttaaagcagtggctctcaaccaactagcatgaaaatcttgcaatattttaaaaacaggtgtagacatgctggtaaaactgattgaacaccagccttggccataccccgtgtgaaaggaaaataaaaactcaggacgccaattcattctgccaagaggaaaaattgaactaaacgctgagtcctgcaagaagctaccttctgttttgttcctaattagacagctacaggtcataggtaaatacctccataggtagtgactctatgttcacatcatattctgtaaagtgccgatttgctgagcatgagatcaatacataattgacagttctcctacctgctccttttctcttgcaacaagtggatgaccataccctccctctttcccctccagctcacttttcccctttccctcaaactaacctttggagaaaggcacagaccacagacagtttctatgaatccatgtttttcatttcttcttcttctggacatgtccttaaccttggtaaaataaacttctaaattgattgacacctgtctcagatactgtttcgttttacaccagcatgtaaaatgtactccatggagacacggcgctatagtgtgggtggaagtgagcttgtggcaatgctactgtcttccatggcctgtgtgggatgtgcaggggttcggaagttcctccaaatctcagtgagggaatggggaagggtctggcacaagcctgtgattgggacaaggaggcagcctgtagggcaccttttcacccgtgagtgaagaggctgcaactgtgatgtacagcagaggtgagcccctggacagcccagccaccagtaggaccagtcaatcttgctacctggtcaccagtccaggtagcaggagagtccaatgaaagcaaggcagggaggagaaaggaacaagaagatgcttcttatctccttcaccctgaggtcccacgagccatgcttgtctttcctcccacactccatcttgggaataagtgaaggtggagaggagaggagggagtaggtggtggttaaatctgaaagactgggtttataaaggtatcatttatacctcataataatgtagttgactttgatagacaatgttcaaatcattcaagccaactaaatttaatgcattgaattaaaatagatatttttaaaaagaatctagccagtaggactctgtgaagaagtctgggttagttttaggaagcatagaaaccataattgtggtgtgtgtgtgtgtgtgtgtgtgtgtgtgtttatttccaaaactagggtgtaagtaaatttgcaaccccaatacacagagagtagaggaggaacaaacgttccagttttgtttgcctataaatttaagaaacctgaatggttaaggaggtgaatgtatcagcattttgctattggcagttttaaatttcagtatatctagtgtgggtttctctttgctggcaggaaaaatgcccaaacccctcaaaatctggcatcctaataaccatctccctgacaaaatgtgagatgagcaattgaaactcgacacttggaagtgaggcctgttctgctgctgtaggagtataagtgcttttgcatgatactttaatcatccaagtacataaaagggacaattttctaaaagaacataattgcacacaacatttgtccaaataaatctgcaagtagataatgagaactcaagtaatgagtacaataaagcactgtaggcagatcttaaaagcaaatcacatagacgctaagctgagccttactttgggtagaattgtgcaactgggctgcttaggaaaccaccttcgtctcactaatgcagttaggctaagagaactaccactagtatgttgtccgccccctaaaaggagaaaatgtagcttgttacacaaggaccacacaaggaactttagtttagaactcagacaaagctgcaatttaaacatgagatcctatccatctctcacgtgtcctggccaggaatcagggttcccacaaaagaatggtggagggttgggggctagtgagagtgggcaaaagagagtctatccacagggcagctacaggtttaaagatagaatgtaaaaacccttgctctgtaaactgcatgcactctaaagaattctgtgtctgctctagggtcttggctaatgcaaaagggggctacttgtgtgcctagtttctgggtgcttctttgtaaggcaatggcactcagtgtacaatgtatgtagcatcagcctcacctgagagcctgttagaaatgcagcttcctgggtaccacgtagcctgagtgaaccagaatctctggggttggggcccaggaatctgtttcttgtcaagctttccagtgggttctgatgctcagtaaagttagagaacgttatggaaaaagcagataacagtggccagaaaaagaagtcttcaggcataaagatgcagatggtggcatttggaggtgaaactaatgatcactgaaataggaagttgcaggaagatctgggcagggcaccaacggcatttgctgtggtacaactcaccctccttataccacttcccttatcatgatgtgtgaatccaggcacagtgttgccagaccctttgatttttcaaggaagacaggaatctgacattttatatgacatcttccaagttttgatttgtggcaatcaatttatagtaaaaagaaaaagagatcacaaagaccacttgtgtgtgtctcttttccataaacttattggacttagcgggtcatgggtttgaattccggccaatgaatttgtcaaagtcagtcactcactgctcactggcccctaagtaattcatttatcaaatgttggccctaggccaaggaaaggtcatgatgattctacacaacacttaattacaagggcagaggaaatgccttctgacttagcatctaccttgtccctggtatacttctgaaggttttacacacattacattattcattcctaagccactctgtgagatactatttattttcctctttcaaatcccaaacaccacattctcccttcttaacacaaattagtgactcgttagatattacttatgccatagataataattgaatgatttacttttagttgataaaagataatttatctagtcttttgagaggacagaaagcattcattctttcaaacctgagcaattctcggtcatttttcctaactttaaaaaatttttaaaattttttagttttttttttttttggcgacagggtctcactttatcactcaggctggagtgtagtggtatgatcttggctcactgcagccttaaactctagggcccaagcagtcctcctgcctcagcctccagggtgctaggactacagacaaatgccaccatatccagctaattttttagttttctggtagagatgagatgggacttcaatatgtttcccaggttggtcttgaactactgggctcaagcaatcctcttgtctcagcctcccaaagtgctgagattacagatgtgagccaccacgccctgccaactttttaatttttaaataatgataaatccacaggaagttgcaacgtgcacccgtctctccctagtattcgcatcttacacggctacagtacaatatcaacacttgtaaattgattaggtctaatttatagaacgtattcaaatttcatcagttacaaatgaactcattgtgtgtgtagtgtatataagtatactctgaaattgtatcatgtgttgccaactagtcagctaaccaagggaaggctagttacccggtgagttactacggtgggcaactagagcttgatcctgctgaagaagtctgggagactgtgtagaacagtgcaaaagtcattgtggtttttgccactaaaagtaatggcaattacttttgcaccaacctattataaccaccaccaaaatcaagatacccaactgtaccatcagcacaggacttcctggtgctgttctttacagacacattcccacagccccaaaaccctgccaaccactcatctgctgtgcatttctataattatgttatttcatgagtgtgtgtgtgtgtgtatatatataaatatatggaatcatatagtgtgtatccttttgagattggtgttttctcactcagtataacttccctgaggttcacccaagttctcgtgtgtatcaattgtttgtttttattgttaagtggtattccatgacatggatatattaatactatttgtttaatcattcgccctttgaaggacatttaggtagtttccactttggaactattataaagaaaactgctataaacatttgtgtacatgtttctgtgggaaaataagtttccatttctctggataaatgcctcagagtgcaagtgatggtcgtatggtaagtccatttttaattttgaaaaagaactgccaaagtattttcttgagtggctgtgccattttaagttcctatgagcagtgtatgaataagtgttgttatcactatttttcattttagtcattcttaaatgtgtgcagtgatagctcattgtagttttaatgtgcatttctcaaaggccaatgatgttgaacatcttcaaacaggaagagaacccaatatctcttgtgtggcagacagtattttccaaaaatgccaacaataattttgcctatcccatgagctcttcttacaatatgacttaatttttctcacactgaggaggactctaaacccctgccccctgaatctggaagggcttgtgaccatggtgaaagtaatgttatttgattctgaggctaggttataaaaatgccatgcacttccacctcgttttcttgggacgcactcttgggacccagttgccatgccatgaggaagctcaagccacatggggaggccacctattttgtaggtgatctggtggcagctccagctagcctgcctggactgactacctgacatgtgagtgaggatgacttccagataactctggccccaggcattatctaaccacaagtcagagcagcactgttttgctgagctataagagacaatactaaaatgactgttgacttaagactctaaatgttgagatgcttcgttataacagcaatagataattgaaaaagtcttctccactatataatgttgtacactaatagactcatataataacacactctaagccttttcttggagtagccacactccatttctgctctcttttaaaagaaaagtttccttttcctacagatactggagaaaccactggagtcaatatgatgcactgttctgaacatgaatgagtaaactctggacaaaatggccaagaggcacaagatccactcaatatgctcttgcttcctctgcctggaatgctcctgtttctggcagccacagggtccagtcccccatgtctctgctgtaacgccaccacatcagagggatcttctgaccagcctccataagacagtacccatcacttccatcactccccattctccttaccatgcctaaattaatcctaggaaacttagtatttatcaccccttgtttggtggggattttgtttgtttatttatctatttgtttattatcacattcccagtccccaaataagcttactagaggaagtgattttgctttgttcatccctaggatttagaactgtctgttacacgtagcagacattcagcaaatgttcagtaaatgaatgagagaacaaaccaataaggactaaaagcatctacaatgtgtctatttatgtgagctctttacagggtgcacagggatgcaggaggtgtttgagacaaaggttctgctcttgagaatgacaactcaatgatttaaaaatcttgcacattgaggggaggggagatctttaagtaatttgattaaacaatgacttcttagtctcatttctgattttgatactggatatgatcttacagcaaggaagcctgtaccataaatttctagaaacagggaaagaaagtctttcttgaaattgctctgctagaccagtttaatgctttgcaaattgcattctgacaccgtggagccttgcgtaggtgctttccggagtcaggccagggaggattcttgaccttttctcatagctgtccactcatatggaagattaagaaaaaatgcatacacagtcttcttctacctgtatccacatccctttgcaatgtgacttggcatcttctcctatcaagaggcagagtttatatccctactccttgagtctggtcttgaatatttagtaaatataatataagcacaggatttgaaagggcctacacatcagggcttgcctcctttggtgctcttgggaactttgctacaggtatcatgtgagtaagtccaggtgactcggagatgagtgatacttggccctgttacctgcactgtccctgctgagagccagctgactgccaagcaaatgagtaaggctatcaccataggctgatcacaactgcaagagggagctcagctgatgtcacatgatgcagagatgagctggtacagagatgagttgtcccagaggagtcagcacaaatactggctcagagataagtcagcaaataaatggtggttgttttaagccactaactgttgagtggatgtagcaaaacctgactgatacatgcttctactgtaccgttctttcttaagagaagcaatgcaatggttaaagcaatgcaaaaagcaggacttaaaactcctcattaaacacattcccaagtttgcaaattgtgtatacatgtacatggaaatacgggaaaaatcggtaatgggattaggagtgatctttgtcttatcctctatacttttctgagtttactacattttctacaataatatttacaatctttttaaaacaacaagaaagaaaagccaaagtgcttggacagtttcttctggctgccctctgatcattcctgggcaatttctgatatgacatgaacattttccatgtggcaggggttgcaggtgtaaaagacaggaacatcaagggaatggttggctccattcatgccaaggccattgcctctggtgggagtttcagggggctccggagagcctaatggtatagagctatgctttgaaactcttccatttaactaagccttccttggaatgtcaactggttatttccttggctgttatattccatgctctgtgccctggtgtggctgatgagtttcagcagaatcccttgcacaggttgcagtgatgtgaaatacggaaatctgggcctagaggtttgccagtgtgataaatatcctctgtttgtcctactggatccattttcctccctcctccaagccttaggaaaccaacctatattgactgcattttggctcctagctgatttcagccaatagggagcaccagtaggacactagaaggaagaagagtgaggttggaggatttattctctcagctctcatcctgcaggttcaccttggtttggcttctaccaaagatcagagcaccctccaggcagctccgaaatctatagcaatctccatttccagattctagtagccaggaccttgcctcaccacttcaggcatggggtagtaggagtaatgttccattataaagtactgcactaatcctcatacactattccttatgatttttctacatctgcccacgcttttgtaaactgtcctttattacaccatcctcaaattacccaagtggagttgatcatctgttacctgcacgggctctggaaggtaatgtggacacatgtattcatgtgaataggttggatgcacccctagaagagtcagctcttctcctccaacaaaaaacagatgtggcagaaaaggaaaagaaatagccatagtttctattacttcctatactcattgttaaggaggcaaattatccatcaaagtcaggcaattctgactaacaaggtgacacagaggaagggatggtaatttcttttttgtaagtgttctgggaagagaagtaggtgacttgtgactaagaaaaattagagttataaaaaagtgtttctaaaagagttatgcccatgacagacagagtgacaagaaaaactacgaacgggccaaacatgaacatcttacccggccatcgcttgtcaggaggatggagtcactttttatgtccctgtgaatcactccttggttatgaaggtaggagagagctctcagaactgacaggcagacagtagctatctgttcttcattcattctggaaaggaaataacatttaaggaacaagacaggtttaagaacatctttgaaatgctcaagagaggcagctcccttgtgctttagtgaaacagtccacgtgctccagcccatatctgaaaaacctgcagacaagggaaggaagtctttgggatctgactcccagaaaaaaggcttggcactaagaatgacagggaccaaatataagtcaaaggaaagagatcactatttgtcagctttttggtcattcatgcaaatgcacttccaggaactcatttatttatttatttatttatttatttatttatttattcattcattcattcattcattcattctttgagatggagtcccgctctgtcacccaggctggagtgcagtcttcctttttttttgagatggtgtcttgctctgtcacttaggctagagtgcagtggcacaatctcggctcactgcaaccaccacctcctgggtccaagtgattctctctgcctcagcctcccacgtagctgggactacaggcgcccatcattatgcccggctaatttttgtatttttaatagagatagggtttcaccatattggccagcctggtcttgaactactcctgacctcaggtgatccacccgcctcagcctcccaaagtgctgggattacagacaggagccactgtgcggggctccatgaactcttaacagataattccataggcatcaacaagcctccagggtcccacagagtcagcacactgaataggtagatgaaggtttcaggcgtggctgttaaatgatcataagaaaatcctttaacttccttgggtcttattttcttcatcttagaaatggggacagccacagttttcaaggctgagctcaggcaaagtggtctttgcatctctaatcctccctctgggacccaccctacttcccattcaccctctctcttcttcctccaaggagctagaggtttttgtcgcttcaggtcccttctctcaaaaggaaattggacctaggaagttactaataacagagtgtgaatggatagtattttaataaatggaccatgggaatgagaaacgaagcaaagcattggttatggcctcccatatctcatgactgcacccctgtggagaaagtttttccttctccacagttttagagggggagggggaagtcagctaactgcccaaggttgcgcagctaagaaatggccaggtcatgattcaaaccccacctcttttttagtccagaacgcacgctttccgactttcccactttcccattttcccacactgccctcaccacttgaatgaatggattttcctaatgagtgaaatagttcagccacagaggaatctaggtgagaattatttggatggcacaggttgttcagtgccctcaaaatgactcatttaggcagctgcctaactcatctatgtgcaaaacttcttccctatcccatgttaaataataaatgtaaaagaggtcctaaagcgaactatcatccaaacagaggagactgtcaggagagacagagggtgtaaatgaccagagcccaaatttaaggacaaacttgtgaaactccagtaatcccaggtaaatctaaggtcagcagaataaggaaatgaatggctttgaattttcatttcagtttagttgatgctagaaaatcctgatgggattcaaaagtaaggtataaagtggtagccaattaggagaataccaaaggtataaagttgatgagtatgaagaaacacacccttcccctcaaggaggatttggcctttgggaggccaaggtgggaggattgcctgaggtcaggagttcgagaccagcctggccaacatggtgaaaccctgtctctactaaatatacaaaaaattagctgggcatggtggccggcgctcgtaattccagctactcaggaggttgaaacacgagaattgcttgaacctgggaggcagaggttgcagtgagcggagatagcgcctctgcattccagctaggcgacagagtgaggctctgtttcaaaaaaaaaaagaaagcaaaagaggattccacagcaccagtctcatacaaaggcaggtgacaagaaatgtttttgcctgaaacagaggaagcctacaacttctgtgttctgggttttgtggtatgttggtcattatcctgaatggttttcacacgaccattttcacatgtggaaaaacacattcctcagaggtttacagtatatgcagcagggacaagctcacatataccttcaaattaattcagaaccaagaaccaccatctttaataaaattattttctcttgaattccgtgaaatttgagttatctgaaagaggtataaagattctttacaggtcgactatatcaaaaattacttgaatctaaccgctagtcactaacagaaagatcctatttgactggaacacgtgacaaatacttcctaatccagtgtctttgaaattagcatggccagctggagaatcgttggtgcatttcttcttctacttctttcctataggaaaaaagcttggcatggaataaaaaacccttcagttctagagtaacctcaaattcaaatcctggctgtatcagttattaaatgtgtggtcttaagaaggataccttttaaaattttgagatagagtcttgctctgttgcccaggctggagtgtaacggcgcaatcagagctcactgcagccttgaacttctgggctcaagtgatcctcctgtcttagcctctcgagtagctaggactacagggacatgccaccacactcagctaatttttaaatttttttaatagagacagggtctcgctaagttgcccaggccggtctcgaactcctgtgctcacgtgatcctcctgccttggtctcccaaagtattgagattacaggcataagccaccatgcctggccaataatatttttcctgtttgaattgtagcttcatcacctggcagacaggtacatcagcatctgcctcatagaaatatgtgatggttacatgattaacatatgaagagcttgatggtgcttggcactttcccttcccttctataaccctctgtttcctggaaattagaaggatctgacgtaacaagatgttaagttaatgctaacacttcagtatgtataagaaatacctgagtatttgggtacagcatggattctcatttagttggtctggggtagtacctgagattctgcatttctaacaagctcccaggtcctcagacagcacttggagttgcaaggggttagatgttttatcaaccgatcaataaatcattcagtaaagcagttattcaatatctattaaaggaagctctctgaattctgagtttaagatttcgaataccaagtattcatggtgttccttgacacacaattttgttttgcctctggagttactgggtctttaaaagggaaatcagttgacaatcctggatgagaaaattagaaaagaaaatggattttagggacagactgtcttgagtggtttccatggatacaaaataagaatggaaaggaaccttgacaaaggtagagctggagacctgagtggctgtatgaagctctggaaggcaacaaaaaggtttctcccctgaatatatttttattttttgctttatatgtgaaaagcaaaaaatgtatatcacatttgccttatgcttagatctttccagtatatttgtttctaccaattaagatgatcttatgtgtttttttgttgggcatgtcttattgctacaacatcaagagtctgccagctgaattgttggtgataaatgtcttcactcacaaagctttattttgagatagcctactccagaccgagaactgtagagccacgtaacatctcatttcagtggagaaaaaacagcatgttttatacttcacagggtttcccagtactttcttgttaccttgttttccaccaattatgtacctggatccacttttgattcaggtaccatttcaataacatcagctaacactcaatacctcttcctcatgacaatccttccttaactttttggcattttatttaccatcaaaaccaaagttaaagtttcccaaatgtaacatgctattttgtatgtctattccacagaaccttgcttctccaagtatggtccatgaaccagcagcattgccattgcctgaaagtttgccgtaaatgcagaatcttacaccctctctattgagtcaggatatgcattttgataagatccacagtgatttatgtggacactgaaattgaagaggcactgtcctagcacatattctttcctctgccttcaatgcccttttcctcctacttgccttcttagtgaactcctattcgctctcaaaatccatctcagatgtcaccttatattaaatagaaatatttattgactctttctgagagagacatttaggtattcttctatgctacatatatatatcttcttaattctgcacaggtattataatgtatttctcatcagtgatgtccctgaggggatatatctgagccacattcatttgtatcttctgcatctctaccacttacaaaacagcctggcacataaaaggtgctcaataaatacttaatgaaatggctggaactggcacatcagggaggcaaatagctgaagcaataggctggtaattaaccatcgttacttgcaagcatattttaaaacagaattgcagaatttctctgtgccacccagattcattattttgatacaaaacttcaagtgatcctctccctgtcccttccttcccctggtatccttggtgtcttagcatgcagcaatggtagagtaactcaggagaatgaaattcagctttagaaatctatataggcgacaggacattctattatttgtcactgaagcttcattcttagcaggttgcttattttaaatcaatgggtattaatgtccttctgagggcagggagaacattcaccaaatgaatgaactatacatgcctgagagcataatgggccctctggggaatgtaggggaaagggtagtcatattccctgactccaaagtgcctgcaatttatgaagagttcatagtcactgcggctttatcctggagaagaataagaagcacctcgaattctctggataataaagaagcctacctggtgtgagtcacaatgtctgtcaaggcaccaccttctagaaactccatgaccacccagagctcatcgccgacaaggtagctgctgtacatgtcaaccacattgtcatggtggtaatcccgcatgatcacgacctggggaaacgggaaatatacttttgacttgtgaagatgaagttgctttttgttctcttgtggccacaactacaattgtaagtaaactgattgagaggtactgattgtggggaagtttattcagaaaatctattacagacaaaaagcatcaagggtagctagtagaaataaaaggaatcaaggtagcaaatttgagagaaaatggcaggtcactctgacattggagagacacagagagaaaatgaaaacaagtagaaccaaagcaagatttgcattcacaagagggagtttggttgaccatctttggggatatgatcagatatctctaagggtctcctttagaatgcactgttcacagtcctctgctggttatcctagcaaagggtcaccaactcgtagtaattgagggaatgagtcccacaagtgaatgaagtaaactatctattattagaactggagccacacaagaccaacttaacttctccttggaagtaggtatgggttgaacttcagagatatttgggctgaattgaaagaatatatattgaagataaaaataagtatggcatagaaattaaaaaggctaaggagcctgcttgctggagagagcttccagaaattgctgccctgtggctgtttccactcgagttttcagagctagtgttaaataataaactacagaattatttatctacatcatattgctctgtgtgttctggcattgtggtttggaaaataaattccagaaaccaggaatggtggactggaaagatgctgaagcccagtcacctggaactctctgtgagatttggagcgtgtgtaagaaataagcacccgtgggagctggagatgtgtggaggccactgggggcttcatatgagcctccatgataaacagagttcaaaattgcagctgagtgcatttgtacagtgcctgtttatggaccaaacaccttcttacttctcagagaatgggagtccttacaatagaaagacaaagaggtcaagcagccgtagattgttctgggagttagaagatgtggattgtacatgctttcctggagactaacatctaacactgataccctgacttgatattttaggacttagatctctcatccacaaaaacttatctttcccctcaatgctctcataaaattactaaaagaatattactccaaaatactttatgtgttttctaacataattactcatgtttccccacctattttagagctcttaagtgataagtttaaaaggtaaatgagaaagtggaaggtaaacattaaagtacaacaaatatacagagaagggttaattccttaacatatcaatagctcctacacatcaataaaacaaatgctagcaccctaattgaaaactgtgtacagaacatatgatttagtgaagaaataaaaatggcctataaccacataaaattcaatttagctacactagtaataaaagtgctaatgaaaacagtaaggtttattcatatctagcagatgaacagagataacatgacagtctcaatgacgctagtgaaggtgaaacaatactattggtgagggtctagattggtacaaactttctagaaattaacactgtatatcatttatctaaaaaaagtacatatcatttgatctgttcatcctacttctaggaatctaataaattatcagatatgaagccaaagacttatgtgtaacaacactcactgcaaaataataaaagtgacaaattggaaacagtataaatcagaaactggttttaaatatgatacatgtatacgataaaagattattaagccattaaaattgtgttttgacatgtagctaatagaatacgttaatatattttattttacattaataaaaataagtaatgtatgctgatatattttatttaatattaattttattagtattaatgttaacattaggtgaaatttagaaagtcacagaaccacatacatctaaagttacctcaaatttattaaatcagtgactggtttaataaatttgatacatgtatatgatagaagattataaggccattaaaatggtcattaaatctactttacattaataaatataagtaatacaggtcaatatattttatgatattaattttattagtattcatgttaatattaattgaaatttagagagttaccaaactacatatataattatctcaaacaaaagaaatttgtaaacagaaaaatatagaaaggaaacactgaaatattaatgtaggctattccttgactgggatatctgtgggacattttctttactttccatgtattctacaggaagaattcattatttttatagttaggaaaaatattttaaagttcctaaagggtgatagtccattggtaaactgaccctggtctactgttttaaaaattgtttatggagggtatattatgatatcatagtagtgtaaaatatatacatactcatgtagatacagtgtagcataagagttagaatctgctagacagagattcagatcctagctctacagtcaacctgcttgaccctgagccggatctcttaacctgagtccaggtttccttgtaaaaatggtgataacatctttctatctcacagagttgttgtgaggatcaagctagattaatgcttagtacagtggctgatacacatgaagtactttatagatgtaacagccatatatgtgcatagaaaaaagactagaaggaaatattacaggggacgctatttttgtctttatattttcagtgcttttctaatgtcctaaaatgtacatgtgtataacttttgaaatgggaaataaatgttacaaaggagagaaaggatgacccaaacacactctttacctcattgaaaagcagttctcgtctctgttgcttccggaggtccattttcttcactgcaacttgtttccctgtgtgtttctcggtggcgatgcatacgatgccggttgagccttccccgattttgataaagttggccaagtattccctggggtctcctgggctgaccaccagctgcagggccgcccgaaactgttcatgggacaccctggagggctgctggtcggaggaggagccccagctgggcggcgggtaggtgctggatgagaggctgagggagctcaggtaggaagccgtggagatgtactgcgaactgctctgcagggaggggtgatggtacaaggtggctttgtggtacccagacgggtactggtgactgcttgaggaatagcccgatttgctttgactttgaggtagtttggcagggcccctggggtaggtgtcagaccctgacagtggagggctgaggaccatctgtgctcgatcgtaatccacctgggaagacagacatggatagagaatattcacatgctggatctgaatgccacagccgagtggtgagtgagctgactgacagctggcagaatgaggatcaccagtgggagatgagaggatctggctggggcaccaacaggaccggccacacctagggaagggccttctgtggtgcacgtgcaccacagcaggaggttacttcacgtgtgtcatatctaaggtgtacttgcttgttaagccctattttcttgttcagtaatgaaaaaccccatccctcattaaaggacattagttttcagctagcatttttgggagacatttcaggggtaggaggccttttcccatgcttctgaattcacatactagagggtggtatggacatatatgtataacacaggtataacacagcagatgtaggtacaggggaaaatacgtctccctgtgctaagtggtgtgaaccacagggtgaacatgtgcaatgttctcaccaaataagtacaaatataattgagagtgatcagactttgcaggggtatgtgtgaaatgaaaatgatgctagacccgaaagagatcccagcaaagaacatccactctgacttggaagagtgggatgaggggatttattggaggagaatggggaagccagtgaggggattactggtatatgatacaatatgtaggtccagcagtcacttcctggaaagaatcaggaaggagctctggccactcctggaattgctgaggccaggatggtaaagataccacatcttgtcatgtggtatgctcctagcccagggcagaaagtgctaatccatcaatgcactctgttttggaagatctcgatgacaacacagtgctggatacatagaaggtactcagaaaagatctgttgattggacttgaggctctttcttaatgcagtgccccagaaagtctctatcactctactgggtgtaaatggaatggcattaacttatcccactcccctaccatccaccccaaggacctagatctattctaatatagtagctacaagctacacgtgcctatttaaaataaacaaaaatagattaaaaattaaaaattcagtttctcaatcacactagtcacattttaagaactcagtagttaccacatcacacagtacacatataaaacattttcctcattgcagaaagggctattggatggcactattctagatgaattgattgttcccatgcagcacattcattcatttatttcaaaaattaatatttgagcaactatgatgtgctatgcactgttttaggtgtgagggggagggtccaccaacagtcaaaatgaatgatatctctgccctcctggggtttatgctccagagaaggaaatagataataataaagaaaaccagtaaatatacagtgtgtgtttcagtagtaatgaataatattaagaaaaataaagcagagtgagggggttgaaagtaatgagatgccatcttggatagggtagtcacagaaggactctctgagggggttccgttggagcagaagcctggctgagtgagggaaaaagcaagatccctttcctaggaggggtggtttgggcagtgggagtggcacatgcaggattctgaggcagatccaggcttagtttgtgaggaagagcagacgctcagctatagtggagtgtgtccactaaggaagatgggccgagaagctgccgggggacagatcatgaagaccttggcaaagacgttggcttttgctccgagtgaggtgggaagcactgggggttgctaagcagacaggaatgacacagtctgactctctggctgctggaggagagactttggtggcaagagtggaaacagggatgccagcagcttatcacagttaatgtgggctgagattagggtggttattgtagatggggtgagaaatggtgaaatctagggcaggatttgaagatggagctgacaggatttgctgatggattgggtgagatcttgaaagacaggaatcaaagatggctatcaggattttggcctaagcaacaggccatttaatgagatgaggaatccaggggcaggaacagggcttgtggggtgtgataatcagcttccaaattgctctcaatgacctgtgcctcctgacattcatattcctatgtagtccccttctacactgtattgggatcaatctgtgtgatcaaagaaaaaggcagagatgatggcaagttcctttgctttcttacatcatttattttggctttcaccagctgccatgtcatgaggacactcaagaatcctttggaagggttgggtgcagtggctcatgcctgtaatgccagagctttgggaggctaaagctgaaggatcacttgagcccaggagctcaaggctgcagtgagctatgattgcaccactgcactccagcctggatgacagagtgaaaccttgtctcagaaataataaaaataataataataataaaatagagaggtccatgcagcaagaaactgaggactcctgctaagagctagctagaaattgaggccttctggcaaacagccatgtgagccattctggaggtggatcctccaggtccagttgatccttcagatgactgtgttcctgtttgaaaccttgactgcaacctcatgagagattccaagacagaaccaatcaatcagctaagccctctcaatttgtgacctacagaaactgtgaaatagtaaatgtttgttatttaaagtttaggggaaattagttgaacagcactattttttgcttcatgaggcagtttgttttaagccatgaagttttgggataatttgttatgcagcaatattgatagctaatacatggtggaaaattaagagttcttttagccatgtaaagtttgggagagtgattagacatccatgtggaggtgtcacttaggagacttaggcatgccccaagtccagggaagagttaaagctaaagacatgaatctgagagtcatcggtgcttagttcatattaaaagccatgatactgaatgtgtaagagatggtctgaggaccccaacgtctagataccagaaagagcagagggatcttgcaaaagggagcagagaaggagtgacaagtgctgtagaaaggaaactaaggaagcaaggtgtcctggagccaagggaggaaagtatttcaagaaggaagggctaatgaatcctgtcaaatgccactgagaagtgggatggggcatgttgctcattggatctggtgacatggtagaggcaagcaggtgtttcaagctcctgccccaccacgatgcataagaaggtagtcattctatcacatcatggagcaataactgcacacagtgggctctttaaaattgctaccatagcaccattctcagtcccccaacactgcccattggttctacaatgacagtgcctggcctgctgaacattcagcaatgcagcccttccagcttcaaaaacactacactttactaggtgaattcaccactcagacagccttggcatcaaccagcaggaaccagggtagctgctaagctgccctcctgccctggttgcagagagaacacatgcttttgacgggcataggaatgaattctgactgataattttagtcaagtcaacctctctgagtcttagtttccttctgactctgataattttagtcaaatcagcctctgtgagtctgtttccttatccgtaaaatggaacaataataatacttacttcctttggtcactgaactctaaaggatcaaatacatatcaaagtattcaaacaatgactggccagtaagttctacttggtgttattattatataaaatgcttagcacagtaatgagaatgcaaaataaaataaatagtaactgcaatattatcaaactagctagcatttattgaagacatacaatgcccctgtggtatatatattcctatatattaatactcaaagcaataagacaagatgtagttaacattaatatattgaacaatgtatagttaaaatattcaaaaccaagctgattcttttcaaagcctctgtatttgtgctacacaaggaaaacgtgtgtgtgtgagtgtgtgtgtatgatggaatggggagagagaagtgtcagtgtaagttaaactacgatggaatggggagagagaagtgtcagtgtaagttaaacaactggattcttccttcaataagctccagattagtcaagtctaggctagtcagcaaggccagggtgtgaagggaaatagtgttttggcttttatttctgaaagtgtgtcctgggagccatcacttgccattatcaccctgtgtcttccttggaggactggctcctgtactttcaacgaaattgaattcattccccacaagcatgtataactgatctctgaagatatattaaaaatgggaaagctgcatcctgcaggaatcacaaacaccgctttgcactaatttaggccacttttcttccttatcacctgtcagcagcattatcagaatccacccttaacagctggcatatgacataaagaagaagcctgcctgcaccaaggggacaatttccaggcaaagatggaatgcagagctctttgctgaaagctaaccatcttcaaaataggccatgagacaaaaaggtgctgttgtctttcacggctgctggtaagaggtacagactcttaagcaatggttgaggaacaactagtatcacaagagacaatgttttgaatgaaactcaaggcatactcatcagagaatgaactgttcacttcaagtgaggggacatgtagtcttccctcagaggacaaatagctgactctgtgaaggagaaatgcatgggtgaccccatttggggccaccaaggtgctgaaccattgccttctgttggatcttaacccacatgcggggttccatgatggtgcgtatcaccagcccacacactttcaacaggtcttgttctttttattctgggaatcaagcagggggcaactgaatcccattttgtggttgataaaatagaggcacaaggagacgaaactgcccccaagcaatgcagggcaaatagctccatacttccaaggggacgacataacctagttcttctgccggggtcagtccttcactcccagtgggagggcgcccagcacactggcccacaggccggctcccttgcctgccttggcatttccaacattcattgatttataagaataatgatgtttgatacttattgagtgctttctacatgccagggactgttctaagcacactgtgtatattcttgcacgtaaacctcaagctggacaattaaataagctctgtaattcctccattttatagataagaagactgaggcacagtgggtttaagtaggtcatgcaaagatcccaaagctaaaagaagggagaaatgggattcaaatccagacagagtcgcttcagtacttgggtccttgaaaaattcacagagataggcatgaatgatgggggggggggatgtggtcttaacaggggcgggcagagtgggcaatgatgataaccacagagataaagcctggtcagggtgtttcactgggggcccagatgtttgggcagcctggggcaaaatgcaagaattggaccagaacatgatggatgataatgtctaggagagggggtgaaagacaaattaagggttttttttttttttttggcttgtttgttttgagcagttttggcttagagaaatgagctaaaaaaaagagtagtcatcacagcaaaacgagttgattatctatgtacatcattcatcattttcctttttgttttggtcaaagcagaactctgcattgttacaacatcactcaggctttcttctgtaagttctttcaaggaagaaagtgcaaactttcttctgcgatgagacctcctcacatagctcttggactttcatagtcatgtaagtgttccattctaagttgtctttctcatgatagcctatatttggaaggcagaaaacataaatgatgaatttgtccattcctactgttttacacacacatgttcatgcatgtgagaaagatgtgcaaagcagtccagcttaaactgtgcaatcttttctatgacctgatttacaaatacattctagaaaaaaaatgagtaggcttgaagttcataaaagcagacctatctttggtattgtgaaagggatttgggatctgattatttagtgaaaacacaatgcagtggaatgggactagtgacaggaatgatatttaataagcaaatccagcatatctctcatcacccatgatccaaaccatttccaaaagatttatgtacatagtttacccttgcagaccttacagcaagggcacggagtgcagagcaagggtgggaaactgcaatgtaagagaaaaaacaacaaaggcattcttcccatccctccaaagagaacagtgctgtgattttgtgaacgagtaactccttacaaaggagaccatggtctgcaaagttttcagggggatttccatatggcatgatgtcatgagagaagaccaggtcaattgtcttgcaaattatcacccaggctgctaaactgcttagctgcagggttaccaggtcattaattgtcattgaaaattggatacattttaagaaggaattctctctacaggaatctttagaaatattgacaaaatgaacaagcagtcatgattgtgatttcctcttttttttttttgaaatggctaataacatacacttgttttttagcttcctgacacttttttgtataccatataaattaattctttaaaaaatgtgctttgtcatgtctctattcaaacatgatcaaaaaagaaaaagagcaaaaaagaatatattatataagggaataaataatccccagttaacaactcagccggactacctttctacaatgagctcaacatctctaaagatagggtcagacacaggcttgtgatgtatcaaaattataaataattatagctatgaattcacttaatcaatcaatttcaccagagctacgctggggtggacggggcataaaactccacacagctatcaattgctccgattacagctggttgtcagccagaattcccctgatccatgttagttaaatgcacattaatctgaatttggcagtgtaatcaaggacctaactgaactgtgaaattgaattctgcagtagaacataatttgaccattttatgccaagtcttggggggaagaaagcttggttaggggagggtgagagaaagaagagaaggaaaaaacagtactgcaggagcatctatttggcactgtggccttctgttctgagggcaggggggccgtggctggagcgtgctcgactggggtgtgtggacacagccacagtgtgggtctgtacccacagaatgaggactcggaatgttccgtgaaggatggcgagttacagggagtgggcggcagctggttccagtgcctgaatgtgatgctccaatacaccttttcagagcacaataaaacaaagactgctcatctcgaaaatgaaaacgccaggctgggtgctgcttactctccataaatcaaatgcaagataaaagtgaatcacagtacctctattatctgagcatggaaaggacatcttaaattgtcctcacttgactcaaaggaaaatttaacaggaccaggcttggctttgggaagggaaaacgactgcttgtaagaattctggagagaatcattaacttgcattctctgtagggacaggatagagactggcaattaggggaatgggactcattgaaccctataactcgtctgtctctctggttgtgccctgcaaatgcacactgagagttggacaagtggctcatgaccctacaaactagcaaagcctagctatatgaagcaatgaataaatctgagatgtgcagggtcaggcatacgggtattccaggctcttcctccacctctgaattggcatatccaattaaccccccacagttgctgcttcaaactcaaagaatgtgtcttctattcaagagcagtgagacagagcagattggtctgacctgcgatccgtcatcgcctgcagtgatgtggagggactcttcgtctttggggactggtttgcagcctcagaatattgttcaaatatgtcagggcctctgagagagctaggaacggacaatgccaggttaaattcattttgtttttaatttggtaatgggaaaacccattcataatgaccaaaatacaatttattttgaatcacaagagcattcatgggaagaagtgtccattcatatgcaaaggacacctaaagtctccatcagaagggacagacgttagagatagtgcactcagtcagtccttggatgttttatgagccttaatgaagaccctgtaggtaaagaaaacaaatctaaatatatccattgttatattaagtgatcaagtgcttctctctttccccctcagatttttagtgcagcccatcagttttcactagcactgtcattccataacccattaaaccctgaatggatctctgaaccgagttctgcagggatcctcagtagaaaagaagttgctgttctgttgttggagccatggttgaatctgggcatgacaagtaccacaaagaacagtgaatcagtaaattattgatgcgggaagactgggcccactggttcaagtgctttttccttccagggaaagcaaagtgatagctaagcagtgaaaacacattgaactgttgaccccagaaggaagtgccgggaaatcacaccatccttttcttcccatcctttttgttttgttttgtttttttagacagggtctcactctgttgcctaggctggagtgtagtagtgtaattataactcactgcaaccttgaactcctgggctcaaaggattgtcttggcctccccagtagctagggctacagttgtgtgccaccatgcccagttcaaagtaggtactgaaacactttagagatgatgaaactgatgcacagagaagatcatacagctactaagcgcttgaatccagggaatctgattatagaacttgcatttttctgtaatgggtgagaaaatctggattatcttttaaaaaatcaaacaagactaccacttaaggtcaaataaatgcatatgagcaccttagggatttctgcacctaacacttcctttacagcccatagttccagcttttacccacggtttacactctgggtgacattaaggaacttctcaaggattccatcctacatgatggaagaacaggaagaataaacagcattccatgggcacagcaaatccacctgtcagtcaccacccattcttcaccagcaaggtgaggctacctctaggatttgtgtctgggcctggagacttcatgtccacctttctgcccctggattttcttctacggaaatgagaatattctggaacacatagactttggagtcagtgggacctagtttggaatcctgactcagttatttgcctttataaacttggggaagtccataaagatttggagtctcagcttcctcaactgtagagcagaggtgatcctgaattcttctggaattgcaaagattaagttgagtcatgtttgcaaaatgcttagcacagtgcttggaacacagtaaccctcacctcactgccaccattcatctacatgctccacatgtagactgatgtgtagattactcatattagtaattaagctgctgtaatttattaacttacttaaccctcatactatataatgagacacgggctgtctttatccttattttgtacataaagaagtggaggcacagttaagcaacttgttcacccagttaataagtggcaatgtcaagactcaaacccaggcagtttatctccaaaatctatatctttaactgccaaaacgtgcttgataaatgatagctattgaacagttgtccttaactgggccaagtttgccctcttctgcctgcaggacatttggcagtgtctgggtatattttggttgttaggagtgagggagggatgctatggacgtctagaggggaacggccatggatgctgctaaacaccctatgatgcacaggacagcctcccacaatgaagaattactaggtccaaaatgttcatagtgtcaaggtggtggaccctgctacagagtgaaaggggatgatgcaacctagttgtgaaattaattgctaattaactgctaatgcaacttcattgcttcaggtattaaaaggagcttataatcaggcaggttgcaggctttgcacccacagaagctgcccctgtgctactggaaatgcatgcaatgtctggtaaaaggcttaagcccaaagagttggatcccagctctgctgtgagcatactaagcctcttaaaacccatttcctcatctgtacaaaggggtcaagaattcttgccttacagatctgtgaggctcaacaaaacatggcatgtatctggtacacagcaaatgcttaatgaactggtgggattgttatgctgggggcttctcagtagggaacggatgtgctgggccaatacaaagacacaagtaggtggctgcctggtctctggagagcacaggaatcagcaaagtcaaatacatggcggcaatttctccagctagcttccttccgtggaaggcagatttgtctgcaggcgagggtggaaagcattctctctccacatctggcagttttcataattttgtggtgggtatggtgctatatggtttttgtttggctttgcttcccaccctcccaaccccagggtttcatctgcttagttccagcaaaatacacttaaatgtagggagaggaggccaacatcaacaaactcataacattcttgattcctgtcctgctagcagggaaattaagtaggtagataacattgaaggattttttttttctgtgggttaacattaatctttttttttctttaggacaaaatgtaaaactgtgtcaaacacacacacgtgtgtacacacacacatgtgtacacacacatgaccctcctcatttctgcttcatctggagacctacacaagttttgtgcttccttttattactggagatgaaaacatgacccagcctcctttaggagtctctgcaagcaaggccgactcatctgagtcgtgaccgctatttcttccctcagctggaaatccaaatgtgattggtacactctaagagtaccgttctaaagacacaggcacctccgtcttttcagagaaatgttgtatttttaatcaagtgaacgttttaattactaacctgcctcccacctcttatcctcccacaaaacaaaaacctgctcatgaatctctcacgagtttcctgtgaaacatggagcagcagcttgcttctttgtatttctgatcgtaagggctgaacacccttggtagaagttcccatgagtgattatgctgtttttgttgttgttgttggtggtggtgagccacaatagtttgtgcattgtttctgggctggcagagccagatttcagggcaggtctgctttgtcttatatttggaagtctgcagaatagagggagcctgtagggaattaaagtgaatcacccctcccaccctcgttcttctgtcacttagacgaaagttctggtggccactgggacttctcatggattttcttggcaaatgcagttgagtccccgagataacatacgcccaaataataggaaaatattgagcagggagaaacaccagacttgagttcttgtccttgttttgcaaccaactaattatgaaactgtaagtgtgtcatgtggctctctgggcctcagtttccccttctaggaaatgagtgtgcagggattgctggtggtgacattaaatcccaaaagcccatgctatgtgaaaatgtggactcagggataccagttcatcctttttaaaaaaataaaaataaaaaagagagaagactgaaactccagaattaagagttctaaaactcttgacctctaaaactatttggactatagacatgtgtagcccacccaatattcatttccaacatccaggaagagccaaataaggctccaggaccaaaatgcagcatcatctgggcaatgttttctctgtaactatgaccccaaacaactccctaacacaaatatgcaaataagccacacgcacacaaaatcttagataaaaaaataaccactgatattcaaagcctcaggatgtaactcaattcagctatagaacatgttaacttatttatttcatatcactcacagaaatgcacaagtgatatgcacaagaaatggaataaactatctcatgtatcatgagacatgcgtatgagttcaagtagattttgcttgtggttaattagacctctttccaacagtcaccctggcaagcacacaggaagagaaagcagtcatgatatcctgagtgtgggtgttcaagtacattaataccacgagataaaaaaaaaacactgtcactatgtgaattttaactggaggaacatatctcaggcctctatttatcaagatttgtttttaattttatatcctgggaactaaggtgacagcttttttgtttcttctaaagaatggctgaagtaactccaacaatacacttaaatggcttctcttcaacatcttggatgaggttaatgagaaataagaagcaaaggaaaaatatcgactatctataatcaataaatcaggtgaatgcaggcaggcttgggttccagagttttctgtgctgctcaccaaactgtcaagagtttggtataaataaagtacatgactgccctgtgagaagtcatgtccctctcacctgcttcaagacctctatgtaatccacattccacaccctacggtccatgttcttttgctggacaggtaaggtagcaaaaacatttctaaatgacagggaaaaataaatcacttgcacattctcaaaggtattttccaagactttagaccttcggacccatagacctttgcctgtgcttttagtttcagtaacttctccggcagtgattcccaaactttaggatatcatagaccagtcaaatttcaaagcaaacttggagctgctaacatttaaacaaaatttaaaagaggaattactacaaaacaaagtgaaaaggggacaaaaatggtccagcggtccagcaaccatctgtcacccccaaatttcatataaaaaccaatatttcaaatcaaatatagtagaaagtacatactcttaatatgaagggccatcccctgagttgaacaaaattggctttatttaaaaattaccatgttatactgagtttctttcctttttagcaggtctatgcaaactttgccaggatgtaggaaccactggatggctcgatctaatgctctatgattgtatatgactgatccactccttaacagggaacttagtcaaatacagtcacatcatatttatcactcatatatcagaattctatctttcaaatcaataagtttattcgccttttaatgagaaaccacgtaggagggcccaaaagatagatttttattttaatgaatatatatgccttatcctaaacctctgccctggggcctcacaagtggagatagggtgggttttgatattgattttcccttaaaaggcaaacaagtactttacaatccaatcgtataaaaaggtcgtgccagcaccacccctgtggaggtttttgcacacgtgagggaaaggaggtagcaaacgttacctttggaatgcacattgtgggctcggacaagcgagggtaggtgtaggagttgtaggagtgtccttggggatgggttttaaatgcacttgctccaaatggcatcatcggttcctggagtcccgagcctgacctggacctctgccgcatggtgggctgagggcttgtctgattcaggtacgaagactttggcctcctgtcatagtcatccaggctgggtccccattcactttcactgtacgccaggctctccttggagcacccgctggtccctgcagttctagaaggtgtgaattggaatgaataatccagaggggagctactcgaggctctctgatactcccacttgaggtcactgtattcacttggtttgctcagtgagtccaaatgtgagtgataatcggcagaaaatctggcaaaatcggatttcaaaggcttcacctcagaatagtaggcctccccgtgcttcattttcattacgtgcccattttgcttggctgcgtggctgcctctataatacggatccagatcatctccatagagactcttctccctgtacttttcggtcgtgtagtcagcagtagtatcggattcgctggaatactgggagaaggtgatgaagccattttcttccgcgtggcctggaccgtggctggaggctccctgatctggggtgggtgggctttctttccttagggagttggagcgagtcaccgagatgttgtcaaaatcctctagcaggccgttgatggaggtttccttgcagggtttgtttcctctaacgattgtctgggaataatagagggaatattgtttaaagaaaatatttcatggatttaaattgatggtggcatcccacccccactccatccaaattaaactacagaagaaaaaagaccccgggaacacttaacacaaaatgataaagaaaatgtgttgattgacttcagtggtgaaataaatcaaatagtaaacaatctcaaattgcatttttcttcttacctatctcaacagagacatcaaataaccatcaaaaagccatgtaggagactacatagaatataactgttttatttaccagtttacaggcaaatcccttccccctacttcttctacctaaataataagccctaaccacctaatgatgagctgataattataatttaacactctataactgtttggtaataaaaaataatatttattactgttttacattcattattcagatgattttcaaaaccagaaggcattatcacccaactattaacataactagaaatgggtgtacattttttgcccttatatggaagacataataactgaggttatgaaattttatggatgaggcaggcacttcctgaaactgtaattaggaaacagactgaagattatttgtgtgatttatgatcaaatgtgatattcttattaagtatatatacttatactatactgcttgtttgttatggccacacttctgtgtaacatcaccgctgaattttggatggcttagtaatgatggttgcacctggatcttagtgacaaattgttccctttaatgaacctaaataacacaagaataccaggaactgaaagacatcgcaaaccacttacaaagcccgtcagccgtgccttgacaatgacaggatttgcaggcaaatatgatgggggtggataaaagaacaaagaacaaagtgttgtgacttcagacttccaggattttaggagaaaaatacttttgagcaagtagcaaggagttcaaaactatcttggatggtacaatagaagatttcaaactggaggaagaagtcaaagttgtcctggagctgatgttttatagatctatccatggtgaaacaaagggtttattttttttctttccaagagtcctggactaatagttttgtactatacccttttctttcaaataaaatttttattctagaatagttttagattaacagagaagttgcaaagagaatacagagttctcatagacttctcatccagtttccccttgagttaatatcttgcattgctattaaggaaactccatgttcctatagatttcattaattttctcctagggttctagagtcccatccaggatagttcattacatttatttgttatatcttccgagtttcctctgatctgtgacagtttctcagattttccttattttttgatgaccttgacagttttgaggagtactggtgaggtattttggagaatgttcctccattggggttttctggtgtttttcccatgtttaaacagaggttatttggtttgaggaggaagatcagagagtcaagtcacatttcatcgcataatgtttagggtacatatcgtcgacacgacttaggaatgatgatgttagccctgactacctgggtgaggtcatattttccaggtttcttatacacacagtcacactccccttccctagctttctgtatattgtattctttgggaacaagtcagtaagtgtagcgtctactcaagggtcagggatttaagctttatcttcttgggtgtgtgtgtgtggtgggggtagggtatctatataaagtagttggaattcttctgcacaggagacttgcttatttgctcccatttacctactcattcaatcatttatttatatataaggatggatggacttatggttatttattttatactttgggttataagccaacactctgttatttgccttgttgctcaaatggttccagcttttgtcactgggagttctctcaggctggctgctgtgtccctttgatgatccctcttccttttattttttgagcacttccttactttctgtccctacaagaagctccaggtttatcttttattttccctgcccttccccccaaatcaggcatttctccaaggaacgctaatagtattagaaattaagatttggttccaggaatactcattgctactgggtgtcattgccaggcctcagcaaacagagctccgaaataatatgtttgtagactaactcatgaacacactcacacacctataattatatccatccatctgtatctatattaacctaaacataaatccacattaatgtctctgaatctaatcaagtaccacataattcattcttgccatttccttacctgtaacttcctctgcaacagtaaaaaacatgggccccaccatctgccagtcatttgcctattcagtgctagtataactgttcagcagtttcagattaactcactctaccatgagaaacaactttgtcaactcaagtaccatgtttaagtccagttctttaaaattcctttacacttatagtttgcattcaaagcactgtttccaaagttccttaagttagtgtcttttttcctgcacccccttcaatgaggttatgttataaatgtatagctgttggattctttggtcacattctgcattctatcccaggatcctctgatcttctggtttattttttgttgttttttgaaactacgtacattaattaactctttgtgctgcaaagctctatgggtattgacaagtgcaaagcatcatgtattcactgttagagtgccatacaaattagtgccaccagctgcaaaaatatctcctgagtttcctctagtcaaacattaccctctccccaaacccttgatatcactgatctgttttctgtccttattgttttgtctattccagaatatcatatggatggaatcatacagtctggagcctttcagcttgacttctttcactgagcataatatagtcagtgttcataaactaatatcctagtcttttttttgcctattccttttttattccatagtgtggaattcattatatggaatgtagtcattgttgagggtggtgcataaattgatggattgattgccaaagtaggggatgctctgttggagcctcccttagagaaagaaagaatcatgtatataacctgggacctttcctcagaggaacaacatccatcctcaccccacagattaacttgggagaaacaataactgtgaagagtaaaagatgagcagccttggcagaggaaagatgaaacagctataactcagccttaaaaatatcaagtctctttcagcagcttcctatttcatttcagttgtatcttccctgtttaccacttattttattttattttattttattttttgagaaagagtcttgctctgtcacccaagctggagtgtagtggcatgatcttggctcactacaacctccgcctcccgggttcaagtaattctcctgcctcagcctccccagtagctgggattacaggcactcaccaccacgcctggctagtttttgtatttttagtagagacagggtttcaccatgttggtcaggctggtctcaaactcctgacctcgtgatccacccgccttggcctcccaaagtgctgggattacaggcgtgagccacagcgcctggccttgtttaccacttctctatttcctcagggtggccttcaagccctcttagacatctgttctgcttccttctatggatttaaacttctggcctcctttcctattcaataatgtcttgcactgttttttaaaagaaaacagaaacagtttgtttgtatcacagtgtatcaactaaaagtttttccttttggacagaaattatactcttgcacattttctactccctctctttatgaacaataggcaggttactcaaacaaaatgtcatcaggaattcatggttcctccaaaagagcttcctggtgtgtttaatcccaggcatttgtgttgacagatgtgccacatgggtaatgagtgtaaggcacaccaaggtcttaaagggcccttctgaatcactggatctactcggataatcctttagcaaaaatcttatcttatccagactttctctgaacttgataaacaatgcttaactatattagatttttttcatattcaatgttacctttagctctatatcctagaaaaatattatttctttaaattctatccatcttaaacaatattccaattattctttcttgcctgccccccatgccttcccatctctgaatacacaaaatattcagtctgctaccatggaatcacttccagcatcttaattttggaaagagtctaggtcacctcttctttttactgagtaaaacctgaaacctggagttgactttgccaacaatatttaacaaacaggggatttgaacccaagtctcctttctcccagtctaggtctctttctatggtatgctttagactcttttaggctaaacaaaatattaccagtaagcaatgcaacgttggtgtgtgacatcacaacccagcaaattggccattggtcattgtggtgcatatttctatcgtgcgctccactctcagaaattagttgctgaatgtacggaatatggataattctagattccaatttcaatttcagtgcacacttgctatgtgatttaatttcattctttatttcattacctgttctcttatttgtaatagggatattatcacttgatggtatttagtgatccccttccccctagaattgtagctgcagatagaaggaggtgctagagaacagttttaaaacatcctaatgccctcaacgaaaacactgccttcagtggacggaaatttgtaaatatgatatgaattaagaacatttctacacattcatcaatgaaggctaagaaaagcatgaagattatttaaaaaatgatcagagaaaagcaagctaaaagtctagggaaagtttctggaagaaaagaactatgaagcacatctaggaggaagcaatagatgtaactagagagagagaaaaaagagataatcaccagctcatcatttactggacaactgaggctcagaggtgatctgtatgccttcagatgctaccatctttggggtcaggatggaaattgtgaatacagaagaaaggctctctgctcatatcaaattggtatcccaattatttgtttggaatttatgtccaaaaaacctattagttcatcttcacaaattaacaaatgtctgtgatggggggtagactgttagtgttagaaattcaccactaggacacaggtaatttagaaggaaaaaaaatcattccctgtgtgattcctttgagataagagcattattgaacacctcctttggaagttacaggtcccttaaatctccctatttttacactaaaacccttccaatttgattaatgagttgattgggtagactttaaactaacacttcatttttgagaaatactgaaataataaaatttacatgtcaaaaagaggcatctatttatcctaaaatatctatagatggataaaaaacagaactatagtatctatgtgtctaggcctatactacctatcaatatttttagattactaagaacaacataatgaaggcctattaaatagagctttttcagtcattaatcgtgctataaatatcttatatttaggaaattaataaacaaaaggaatcaatacaatttcatagggattttttgtctcccaagtgtgttcattaacatttctataggagattagagggtcactatttcatcatgtgaattaatgtgtggcctcagaactggggacctgctctttctgtgcacttgtcaccaggtatcccgagaaaaatattaatactgctataagctaaatgctatttagaagaaatgacaaagactgccaattgataagaaacattgtttaaaaatgtagtatttattatcattattttgtatcttaggcttatagcacttatgagataggtaatattaagtgttatcaaacctttttaagtcactgtctcttaatccataaaacattgagactagatccttacctcacagagttaatgtgattatttaatacagtaatatgtgtaaaaaacttggcatgattcctgacgtatacaaagtacttataagtgctagttacttaactattggccagggcggggtggcgggctgcagtggtaaattttacttttaaattaggttgataataaatgaagaagaaaggaagctacaaacaacacctagaagaaataaatctagcttcatatggtgggaaaaaagggataattgatgtgggagactttaaagtactattagtaactttagatacaaaatacatatttcttgaatttaaacagatgtatctcaaattaattacaattgttacataaatattccttctgagatctaaaaagcggaatactttcaaattaacaatcagcattctatagttattcttcttaaaaacgtaatgtatgagtcagaaaaattaaccaagttagactttcaagatttaaatggaaagataggtatagaaaagaaaagttgatagaaatacagtaaaattttgatagtggctgtcatctcagggtgggaagactaggggtgatttatatttcagtccagtgcttctcaaactttaaagtgcacacaaatcacccaagtatcttgttaaagggagactgtgattcagtaggtctgggtggggcctgggatgctagagttccaaaaagctctcaggtgatgaggatgatggtcggagggttacactgtgtatacaatggggttaatgcattttctagatcttctacaatcagggttacctttataacaaaaaagttagactgaggtatgcttttctgtataagaagagtcagcattatatgtatatacatacatatatataagttgtattaaatatgcattttattaactatctataatatagtgttaaatgtactatatgtattgtattctatatatacatacatagcgctaagtacgtttacactatatatacacattgggaattacatgttcattttctcattccctttgaagatgaaacatttctccagcttaaccaaaacgatgacttccatttatttcaccattttggtacacctgcttctttagcaccatgctcttactataaggctagaagccttagagttattgatgaacaaaatccgaacactacaaaagatatgatgtggttacaaacatttagaaagaagaaattttaatcacccaatagtaaaaaaatgaaagaaaaatctaaaagccaaccaaccaaccaaacaaaagggcaaagaaactaaggcatgtcctaagacagtcttttcttggatttcatttccatggttagcatttgaaaatgtttgttgatggtataaatgtatcacactttaaataaagcacacactcttccgtttcaatgaaaactattagctcagtgttaataagcagggggttgcaaaatgtaaatgtttgttaaaaacaaattagtgccccacccaaaaaagtataagaaaagaagacctgttaaatcagaaccaaggcagtatttgttttgctgatacaggtttcactttatagaatcataagtggcaaagcagtaataatgaaaatccaaacatgcagagttttccaacacggtttaaccaggcttccaaacagaagaaccactaattattattgtccgtctctggtgttcattaaagcaaaattgtgcacttttatagagatcaataatacaataactgcaagaggattggtggattttatgccatggaacctccaggcattaaaaatcaatgcaacccaatctatttgagtttgaagccatggtgctcattgtctttccattgtaccctggaccagctcagcatctattcaggctcccagtgacagtggccatatttcatagtgctccttccatgggctgttggctggtgataagctataatggatctgtctgtgaaaacagctgtctccccttgttccccgaaaagagatgaaaaagtgcctctgccctcacagactgtattaaccttgacaataatgaagtgtgtaattaacagctttgccctaataggacctcacatctctttttcaaaagcagtatcttctgtgtgcctcaaacgtgtttcattttgtctttcaggtaaatatagctcaggaggttaataagctaaatatttccacaactgaagtataaacaaagattctctcagaacttatgtacttttaaactgtctatctaaattcttaccctgttggtaaagaactgtcttccttgtttttattaaggcaggtagctggaaacatcaggtaacatagtcacaacaaacagatttgatctacttagatccttataggaagaaacggtaactcttgtttggattttgtaatatcattagatattttcaataaatattttcactcgctattaccaatagatattttatctattttctttcagttctctacatataccttttatttggtaacaacagtggttggggctaattgggtgaacatttgagcattgcatatccctggaaaacaagataattcaggcaacatatttcagagtggaggtagtggtaagggattctaaccagaaaatccctctttaacaaattatgtaataatcttaatcacatggaatccaaaaagccaatttctgtttttttgtttgtttgttttgagatggagtttcacctttgttgcccaggctggagtgcaatggtgtgatctctgttcactgcaacctctgcctcccgggttcaagcgattctcatgcctcagcctcccaagtagctgggattacagatatgcaccaccatgaccagttagttttgtatttttagtggagatggggtttcaccatgttggctaggctggtctcagcaaacttaggttactcataaaggtaaggcatctgtctctttctattctaagacttaaaaacatttcatctttaaaaatcaagatgctttaatatattacaaatttttttttttgaagacaaggtcttgctctgtcttccaggctggagtatagtggtgcaatcatagctcactatagcttcaaactcctgggctcaagttattctgggtagctaggaatacaggcatgtgccaaaatgcctggctaattaaaaaaaaaatgtagagaggaggtctcattatgttgcccagggtggtctcaaactcctggcctcaagtgatctcatgcaacagcctcctgaagtgctgggattacaggtatgagccaccaggactggccaagaattgtttttaatgtgctactaggaaatgtaaaattaaatacgtggcttgcattttacttgtattgagcagaactgatctagagcagaagtcaggaagccatgtgactcatgggccaaatctggccctctgcctgtttttgtaaatatttacatatggtgagagtatggctggatttgtgcaccacaatggtagggttgagttgcaagagagactatatggcctgcaaggtgtaaaatacttactctcaggcccttcacagaaaaagtttgctgaaccctgatctagatacacaggtctcatctttggagggaaaactctgctagtatttgattcatgggctgtgccaaaaaaaaaaaaaaaagaaataagcctccccaaaagctgaatgtggtttcttagagggagggagtcatatggcaccacaggcatcacttcgtttactgtctgcagttctgtcacagaggaggacatgaaacacagttctccccactcctgaagaaatgcagtttgttggccaagtcaattgactagaataagcaacccaaataaacaacccaacactgttcgcaaatgagcttttctggaacagcaattcgagaagcagactggccaagttcttgctgggtggtaaggtcaccttaggcaacagtaggtgttgtgggcataaacaagaatccatcatttcctccctcatgccctgtcctccatatgatctgaactttaaagaatttgtgaactgacgaataaaatgactgccatcagtccgtaaattggtttaataagagtttctagtcactaccatggattaaacacttgctgtgtgccaagatgattagaagtatttttccaatatataataatcataatatgactccaaggtatggcattattacccctttataagaaggaagaaagtgaggctcagagaggccaaggaattttcccagtgtcactcagctagcaggtgggaggtttgaaagcaaggctcacacctacctgttacaaatgctgcctctctatagaatatgaaaaccacaacaccctgtcagcaccctcaacttcaactctcaggagtagaaaggatagtcaaaacccagaaagacaagctccaaaccctttgagatacaatgaaagaaatgtaagcatattctgtggggggcagaatataaaatatttccagaaacaaagctttttaaagaaaggatgttcaaaactcagaatttatggaaattggggaaaaataagttgactggtctttgaaataattagcctttaaagcaacttgaaaattctttctctataacaaaggaaatgttacattgcatttactcaagattctgacatttaaaaatgtaataactaataaaacatgtagtctacatatcaattgcaactacctccccaaatcaaccaactgattaaattatgctctaaatattgctaatatgcaatgctaagggccacaatgtattgcattctcttatagtacaaggcatatttattttaaatttagccaagaaaaatttacctttgcatgtcctaaatttaaatttctgttgttgttgttgttttacctgacatttcaaacaatctttacaaatgtggaaattatctcttggaggcataataaatgttaagaaacttgttaatctggaaataaaaccagtaggcagtcaaataacattttaaactataaagttggtattgtaactatgcactgtaattcatatttcagaaattgactgttcttagatgccaagaaaagagtatgccttatgcaaaaaatagaagagaaaagttgcaatccaagtcttccatatgtctcaaaagtttgaaacttctaaccccattaaatattaaggtcatcacggacataaagatggagagaatagactctaagaactctaaaagcagggatgggagatggtggataaggaatgagggttgaaaaattacctgttgggtacaatgttcaatatttcagtgataggtacactagaagcagaacccccaccactatgcgtgtaatatccatgtaacaaacaagcacatgtaccttagtcagctttaccaaacattccttgatattcattactaatttctctttggtgatcaaagtcagagtactagttacccctaggggaaaggtgctcactgggatggggcccaagggaactttctgggtgatgaaaatgttgtatatcttgatcttggttgtggtcacaagaatacatacatttgtaaaaatttggcatactttacgtttatgatttgtatatcttattacacataaattattcctttgtcaaaatacattggaattgcaccaaaccaaaagtttgcttgacttgtccagcaaatatgcagcactctatgggcagcttctgcaaaggtgggacattggatatactcagaatgggtgtttgccaggcagctgtcatgcaagtaggtaggtagcaatgggcactagaatgtggatgaaccatgcagtttaagctgaaaggagattattaaaggagagtgctgataagtaaggagaatgcagcaaggtcaaagactgaaagtctaagggagagagaacaggtgttgtgggatgtggctgtgggtgggtggctggttcagaggggaagaaaatcccatctcttaaacccaatcagagatacaagcccgtagctgaaatattccagtaactcttagcaaatgccaaagaaatgatgctattcatactattaggagttggcagggctgggcacggtggctcaaacctgttatccaagcactttgtgtggctgaggtaggaggactgcttgaggccaggacttccagaccagcctgggcaacatagctagatccctttttttttctacaaagaaaaaaaaaatagctgggcatggtggcaagtgcctgtggtcccagctattcaagaggctgaggtcggaggatcccttgagcccaggagttggagtttgcagtcaggtataatcataccactttactccagcctgagcaacagagtgagaccctgtatcaaaagaaaaaaaaagagttggtaggttaggctcccttcatcctcaatctctttaccaatcccaccagtggagcctgatgcatctctatgtactaacttggcttacccagagacacctgcaagtctatggtgctttcctttttatttatttatttatttaaattttactttaagttctggtatacatttgcagaacgtgcaggtttgttacatctaggttttaagccccacatgcattaggtatttgtcccagtgctctccctcctcttgacccccactccccggacaggccccggtgtgcgatgttcccctccctgtctccatttgttctcattgttcaactctgttcaaccattgtggaagacagtgtggcgattccttaaggtgctttccttttgcaccgcagaaacgctaactctgcaacatttctttcatttagataagctatatacagaatcaaatcatgtcttttctttttgcaaaatgagacatttatcccaaggatctctctctctctctctctttctctctctctctctctctccccctccttatctaggggtaagagatgtgttcacatttaaaatattttgttcctttgaaacccaatggaaggtttaagaatgcaccttgaggatttctaataacctgtaggaaaggctaaggcagtgagagattccgcttcatctggcagcttcaattgcaggggctcccagccatgcacattggaatcatcagggtggaggccagggtctcttcccagaccaattacatctctgatcatcgttctagggttcagtaatttctgaagctcttcaggggattccaatgggcagccaagtttgggaaccatattgctagaacttctcctcctgccactcaaagcttggtccctaggccagcagcatcaccatcacctggaagtttgttaggaatgcagaattgcagccccatccagatctactgaatcacaatctgcattttaacaaaatctccaggtaattaaaatatacattgaagtctggacagcactggtcaaccaagacaacctgcaggtcacatttgcaggcttctaaattagtctgccttggggaggtcttgtgattcatggcaacatcctgttcctgagtaaagaattatctgagttccttatcttattgacacactgattaatgagtaacctactgacattgaaaaggatgctgatttgtttctgaattatgaagttttgctggtttgtatctgaatcaggaaatttcactgattgtcttgcacatagatgtgttagcctgtatgttgcaatctgtagacaatgacaataatccctgtattgtaccctccaatgaaaaaggacaactctgatatgggagtccctctcctttctcccatactttcctataaaagcattccaacttgtaacagactttggatcattcccaactttgctggtgtgttttcccaggtcatttctcacatttgacttccaataaatctttttaatcaacttctgcttcgacagccctaattttggtccacaaccatttgcctttgatttagtctttactcctaaggtccccttttcatgatccaaaccatttcaactcaataaggattttaaaatcagtccattccctctgtgtatatataaaatcatatatttattacggagagaatttactgatatatataaacacatatacacatacatttagatatatgtatatttaggtgtatttagatgtgtgtgtgcatatatgtacatatacacacatatacatatatatatacacatatacatatatatacacatatacatatatatagagagagagagagatagtatcaaataaaaaaaatctagcccctaaacttcagattaatagggtcattctttcatttaatagaaaaagaaacagcaattcaaaacagaaaaggaaaaatgattgattcacaacaccaagggcacctctggacattatgctcctagaatgcattctgtgactgaatgatggagcgtatttatcccatgtgtttatccaagagggcaagtttaagtccagaatgcaggactctgaaaagagtttactgaataatcccattgattccctcaatgatactaacagaacagcacaaacccttgtaccaacaaagagagatgatccacttctttcctctctaagctgccttgccaaattgaagctcctcttctctaagttatatctcagataaagcttagttatatcttagataaagcaaaacacacacatcagaagagactcaaacaacattatctttcctgtttccaaaattgtattctatcagttgttttcacataaagaccacagatttaacaaaaacataaaatccaggggttctttaacaagaaacataaaatccaggggtgttttggcccaggaatgttcttgaagacatcgttcgctacttcattaagtgtccccctagaaaggcctcctgacacacttatttacaaattagagttagaaagcttggctttcctagaggaaattctgcttttcccactccccttttctgttgatagaaatcttgtaactgtttcaaatggactccccagaggcttgaaaaaaatcaaatttatagcttaactattgattttgttcatgtgtaaggcctgtagtctacttgcattcccttctgtctcttcttccttccataatttacgtgtttcttggccttcactgttgaactatgtaatttgccacacctttattacatggaatttcattgtacattaatgctattccacttgggaaacaaagttgatttttaaaaaattcctctcaatgaccacttctggtctttaatttcctcccttatgaaaatgtatttaagtagtcctcagcaattttaaaatcccttgatcttacatctgacccaggatgctggagcaggtcaatcaactagggtcttctgaaggctgtttactctttaggaaaatactaccccactgcacagacagaaaactatataaaaagctgccaatgtcttcagcatcttagaaatagactacagaggccaggcacggaggctcacgcctgtaatcccagcactttgggaggccgaggcgggcggatcacaaggtcaggagatcaagaccatcctggctaacacagtgaaaccccgtctctactaaaaatacaaaaaattagccgggcgtggtggtgggcgcctatagtcccagctactcgggaggctgagacaggagaatggtgtgaacccaggaggcggagcttgcagtgagctgagatagcactactgcactccagcctgggcgacagagcgagactccgtctcaaaaaaaaaaaaaaaaaaaaaaaaagactacagagaagtcgtggcttgaggagcttttaaaaatcctttagcccagactgcacccaagagcaaatacttaataaataagaatctctggggtaaagaccaggcagtggtagttttaaacctctcccaggcaattcctagtatttgaggttgaaaacccgtgtcctaatgcagtgcgtattaaaccctacttggcacataaatgccccaggtatctccttaaacagcagactccaagggagcaggtctggcataaggctcaatattctgaatttctaacaagctcttaggtgaggctaatactgctggctgcagagcatgctcttagttgcaaggtctcaaagaatagattgtgttcccttggtggctgaactggggtttacatattccagggaaaatgaaatcagcaccatgtcctagagagagtgctggattataaatctggcaatctggattctagtgcaagttccatctgtggcaactatgaagccttcaccaaatcactttcccttgctggggctatggtccttatctgtactgagagggtttccctggcacccttctagcttcaaaattctgttgctttgaaggctctctccatgtctcagctaatccagatagttacagctcctacaaagtgcaaagcagctggcttgattgaaaaacaatctgataggtgcttacctactgggagagaaaactgtatgcatgaactgaggtttgtgtatgctttccttcacttttaaattcctaaaacaagcactgaccctttatgtgaacaaatcctaggttacttacatgagcacatcctgtcacatgccatttggtgtcctgacacattcttaacaatgtcagaaccaaactcgagtaggttgatgcaaaagtggttccaattctcctcttctgtctgtatgcatgtcctttggagtgtgactccgcacctcctcccatcaggagatggagtctgtttccctttcccttgactttgggtttagctctggccaatggaatacagcagagatgatgttgtgcccaatcaagtctacgtttctagaggctgtgcagctttgaatcctgcctggttaccatgtgtacaagtctgtactagcctggtgaatgatgagagacacgaggaacagagaccagtctttccagctgaggccatgctaggccagccagcctctagccaactcagaagctgatgcgagtgagccctgatgaggctagaaccatgggtcaagcacaggccaaactgccaacttgctgaattgtgaggaacaataaacagtttttaaaaaaatttattttaagttccaggatacatgtggaggacgtgcagttttattacataggtaaacatgtgccatggtggcttgctgcacctatcaatctctcacctaggtagtaagccctgcatgcattagctacttatcctgatgctttccctccccccatgacaggcccagtgtgtgttgttcctggcctatctccctgtgtccatgttttctcattgttcagctcccacttatgagtgagaacatgcggtgtttcgttttgtgttcctgtgttagtttgctgaggatgatggcttccagcttcatccatgtccctgcaaaggacatgatctcattcctttttatggctgtgtggtattccatggtgtatacatatcgcactttctttatccagtctatcattgatgggtatttggcttgatcccgtgtctttgctattgcagatagtgctgtaagaaacatatacatacatgtatctttataatagaatgattaatgttcctttgggtatatacctagtaatgggattgctgggtcaaatggtatttctggttctagatccttgaggaatcaccacactgtcttccacaatggttgaactaatctacatttctaccaacagtgtaaaatcattcctatttctccacagccttgccaggatctgttgtttcttgactttttaataatcaccattctgactggtgtgagatggtatctcattgtggttttgatttgcatttctctaatgatagtgatgttgagctttatttcatatgcttgttggccgcataaatgtcttcctttgagaagtgtctgttcatgttctttgcccacttttgatggggctgtatgtttttttcttttaaatttgaataaatgcttattgttttaaactctttttatactgtggtaaaatatacataaaatttaccattttaactatttctaagtataaaatttggtggtattcagtcaatccacagtgttgtacaaccatcaccactattcctttctggaactttttttaaatcatctcacgtagaaactttgtacccattaaacaataattccccttccctccagcccctggtaacctcgaatctactttctgtttctatgactttgcctatctagcttccccatataagtgaaatcacacaagacttgttcttttgtccctggtttatttcacttcgcatagtgttttcaaggtgcatccatgttgtaacatgtataagaatttcattccttttaaaagttgaataatatctaccacattttgtttatccattcattcatctgtcaacagacatttggattgttgcaccttttggctgtcgtgaataatgctcctgtgaacattgatatacaataatctgttcaagtccttgttttgaactattttgggtgtactgagtagtggagttgctagagttaagtccacgtttaaccttctgaagaatcaacaaactgttttccacagcagctgcaccatttggtattcccatcagcactgcatgaggatgccaatgtctccgcatccttgaaacacttgttattttccattaaaaatattattttaatcatagccatcctaatgggtgtgacttagtatctcactgtgatttttgatttgcattttctcagactatgttgattttcttttcctgcacttattagccatctatatatcttctctggagcagtatctagctatgtcttttgcttgtatttgagttgggctgtttctttttattgttgctgagttgttacagatttttctatattctgggtattaatcccttatcagatatattatttgcaactattttctcatattctacggattttcactctcttaacagtgtaattcagtgcaaaaagttttgcattttgataagtctaatttatcattttttttctttcggtgcttgcgcttttggtgtaattttcaaggaattattactaaatccaatgtcatgaagcttccgccatgtttccttctaaaagttttatagttttaacttctgtggttacattttgacccattttgagttaatttatgtatatggtataagataaggggccaccttcattttttaggctgttgggtatccagttctcccggcgttatttgttgaaaagattatcctttctccattaaatagtcttggttgccttgtggaaaagcatctgacctcatatgtgagggtttgtttctgagtgctatattctattccattggcctagatgtccgttcttataccattataatattattttggttttaattgtagttttgtagtaagttttgagatcaggaggtgtgaatcctctaacattgttctttttcaagagagttttggctatttgggccctttgggattccatatgaattttaggatggttttcctatttctgtaaaaaacactgttgacatttagatagggattggattgaacctatggatgactttcgtagcattttcaccttaacaatattatgtcttccaatgtatgaacagaggatgtcttttcatttatttatgtcttctttctctcagtaatgttttgcagtttgagtgtattttaagctctttagcttcagagtgctttgttacacagacttatttgtcataatagataaccattattgatcttagtccaggccactgactctaaggctgctgatttctctgctggatagaaagctcccagcaagggattaacctttcttatctgcaaaacaggttgtcaggggaactgcttctctgctgtcctcacatttccctgcagagtcttccactggaataatacttctgttctctcccacctcccctactcatctgcatgtggcagggagtgtggcttatctggcaggggagaaaggagaacggttagggcccatgcatggctcaaaggaccttctcttcattttttctggagagttttcctgtctgcatagcctgtgttttctacttccatggggtaaggacccagaacttctcttctggaggttaagagtcccactctgaccccaaacaggcaggtaagtgtgtgtaaagtgactcctctgtagcaggttgaccagtatcagccttgcagagctctctcttatatctaagctggagggtgagatagaggtgtatattgtacaaggcctccttagtaaatggggctttataataataaagctgatatctggattcccatctatctttcccacagcctattacaagggagagtctgcaaagatattcacattgccttaatttcatgtgtaagcataataatttgaattagccctggaaatgagaggaaagcaagcagaatttccaagaatttagaaattgaggaagagagttgctaccagaatgggggaaagaggtcaggagacaaaaagggttaaaacagaaagggttggttctataacaagaaagttcccctttattaatctttatgtgctatcatctgtctcttgcatttgatcgtcccaatagccctaggagacttatattattattacacctcatcttacaaatcagaaagaagaagttacaagcattgactgaggttccatagcttttttagtggttgtagcaggtgaaatattctctcgattcttccctccttccctgtgatgatgatatatctcaccgtctgcatgtgactttttaagagcctcccagtagagtgggacccactgactttgaacttggccacgtgtcttgttttggccactggaatgttggtgaactgacaaaagcagaggctattatatatatcgactggttccttgagtctttgccatctgccctgaaaaaaacctgacctgggcagttgctggtccaaaaaaaatgccaagaggcgtccagaacagacctgaacccaacctaaaacccgcagccaactctaagtgacctgaacctcaaagcagagtaaccctaccagcctaagacccatgagcaagaaaaagaaatgtttgctgttataagtcattagcatttgtagggttgtttgctatgtagcattttggcaaccatagttgactaatacactggtgaactcgggattaaactccaggaatgcactttgggaggccgaggcgggaggatcacgaggtcaagagatcgagaccatcctggtcaacatagtgaaaccccgtctttactaaaaatacaaaaattagctgggtgtggtggtgcactcctgtagtcccagctacttgggaggctgaggcaggagaatcacttgaacccaggaggcggaggttgcagtgagccgagatcacaccactgcactccagcctggcaacaaagcaagactctgtctcaaaaataaataaataaataaataaataaataaataaataaataaataaataaaataaactccagtaatgtctgaatgcagaccccttgctcctaatgttgctaccatacaacctagggaataatagtgcccatggctagctgcattgtattcaggtggagcacagccccttggtgtctgggatgtgcttactacagatgctcacctgtcatgaattaattatctttatggctagtgcttcaggctgattcgtcagtcagtttctgagaatctaaaagttctttttgcagatcattctattctcatcattttgcactgcaggacttttccatgctagattagtagctagtaagaagcttggtttacatgcaatatttgacagagctgagattcagagctgctccaaatcagtcaaacgtgaccacagcatctgagctgaacacagaaaggatcctcttcatcaatcaaagttcggtttcctctgagggaataattagaactgaatccaaggatattccccatcttgcctgaactgtacatgtaacagagctttagcaggcaaaactatccatttattcaatctactctaactagaaaataacaaaacaaaaaccaaaaagcaagcaaacaaaacaaagatgtcatcactcacgaatttcagttctaattcctctaagtcacagatggtttagacagaggtggctttgatgtgaaagccaagttgatttattttgcctcattttatcttagcaaagaacccaggaaggtgggagggactactttcaacacggaagcatcacaaagtgcagcaagctggaaggaatggtgccctggaggggaaagattatagacgcctccggtgtagaaaatggccaaatggcctacaagctacctgccaatgacacagtgactttctgggtagatggagctctcaggaagtaatgcaagcacttttggcctttcctgggaagtgtttctagttggggagggagaacacattggcagcagcaagctttacctggaagagaggaggtagccatccattttctttatctgtgtcaactccaccttctctgttttcttcttcccgcttctgtgaatcccttccattcattccacctcattccctgaagactccaagttctgccctatttatatcagagaatcagctcctcctggcacccaaaggtttctgcctctccctggctgatccccagctcacatacagcttctgcctgagaaaaacatttaagactgtctttccatattgttcttcttgatgagctaataccccaactggtacgttagttaagcaaaactgtgtacatcctcacccatgatagggctttcctgactccagatagcttatggattcaagttatttttctagatttacagataacattagagtgcttatgctgtgctgctatacacaccctttgaagtgcctgctctccctctctgtctgtatataatctccataacaaccgtatgagatttgcactattatccccattttacaggtgtggaaactgagtcttgagccaggaggtagaaaagctgtgcctctgaacccaggccgtctagctacagaacccacatcttcactgctacattcacattgctaacgtcataaaaaaagctttacttcctgacagttgtgttaagagctttacatatattttcaaatttaatccgctaaaaaatcctataagattggcagaattatgatcaccacaccacaaattattgatatcagggtaaacacacctgatagcaataacttaaacacatccttagaataaccctgtatggcagatgcacctgaatgtgtgttccaagctagggcatccgggagtggccaacctgattagttccttgtcaatgacaaatatcagagcccctgggctcttctgtggaacacaagctgcctagggcactgaggtcctgagttttgggttaaatgaaggttgccagctggatgtcattagggggaaggtgctatgtgaaaatgctacataaactgcatgctatttgcaagcaattgcggttttcctgccactggaccctctcccctgtatgtgagccccctaataaaaccccatgtctcattttctggctctgggtctcttctctggcctcttgaatggggtcccctttgctattgaggttaacaggagtttgacacaacagcatatggcacaaggacactgaagtatggaggacaagccactcagtgaaggtcacaaagctatagtttaagtggaggaatcaggttttgaagccaggtctctctagagccaaagcttgttctcttagctagaaatcctattcacacccctgcatccaaacttgtgacctctaatgactcctcctgctttgtgagtccctccagcttgatctgctttgtccctttgccacccacacaccaaaatgacacctctttctcctccctctttagacatttagagaaaagatacctggttgtcttgtcagttttccgcctccaaggggccatggaatgctgtaggctaggcattctatggcagggaggaaaagcccaggcttgtacaactcctcactggggcgttatctgggatgcagctttattcagaagcactaggtaccccagtacaaggaactgtagagagaataagtgttctaatttgggttcccttgaaagcaactcaaggaagaaggactttagtgcaggttctttatttgtgaggagattccagaaagccacatgacagactgaagaaagtgcaatgaaaatgagagaaatccacattgggtgccccattgagctggttaatgctgtgggcaactgggcctctgtgctgcagcagatgccctgcagagccatgtcaaatgcaggtcagagaagcgggggtatttatccaagaacttcctttccacattggttaaggattacctttgggggcattcattgcctggcatttctgggcaggattgtcatgtcagagaaagcccttggacacagagcagagagaaactgttagtgtgcatgagatgagtccaccaaagctgcaggtaaactcaggtgtgttcaggggatatgaagcagggcatcttcatgactgctgtagccagctttgcacatggatagatgtaggtttgaatatctgctctgtcacctaactataaggtcttatgcgaactatggaaacctctctgtaaatatcagattccttccctaaaaaacagacataatgatatattgctagattggaggaaggattaagtgagacatggtatgtgttaacacctggcacagtgtcaggtatacagtggacaactactattgcttccccactgggttaaaagtgaagagaattgccaggcaaggtgactcatgcctttaatcccaacactttgtgaggccaaggcaggcggatcactcgagaccaggagttagagaccagcctggtcaacatggtaagaccccgtctctactaaaagtacaaaaaatcagccgggtgtggtggcatgcagctgtaataccagctactggggaggctgaggtgggagaatggcttgaaccttggaggtggaggttgcagtgagccgagatggcgctactgcactccagcctgggtgacagagcgagactccatctcaaaaaaaagtgaagagaatttagacagactagatggtcaaaagtgtaagcaccagtgttactcactttacttaaatttctggatgcttagtaggttgatatgatttggatctgtgtccctgcccaaatttcatgtcaaatagtaatctccaatgttggcggtagggcccggtgggaggtgactggatcatggggggtgaacttctcatgaatgatttagtgccatccccttggtactattctcatgataatgagtgagttctcacaagatctcagtcttcaaaagtgtgtggcacctcctgccgccctctcttcctcctgctctagccatgtgatgtatctgctccacctctgccttccccgatgattgtaagttttctgaggcctccccagacaccaagtagatgccagcatcatgcttcctgtgcagcctgcagaggaggtgagccaattactcttttctttataaattacccagtcttagttaattttttgtagcagtgtgagaatggactaatacacaggtgcttgtcaagtgaaggaaggagtaaaagaccccacatgtggaccgtagcccaggaggggcaataactacaattatatacagtggcatgaataaggctgaatctcataatcataatgttgagtgaaagaaatcaggcacaatcatacaggtactaaagaattccatgaaaattaagttcaaaaaccagcaaaatgtatagttggcaacggtgacccatggaggtgattgagaatggaagcagacacaaggtgagaatctgctggggtgggtctataacatcgtgattcttgatctgatgtgtttcctttgtgaaaatgtgttgggctgtacacttcataacttgtgcacttaaagaatacattaaatgtcaattaaaacttaaaaacataggggtgagagagtataggccttggttttcaagcattgtaggacctgcctccccatgaaatgagaaacagagacaccaagagataatttccttctgtgtgcatctagaacaaagagacttaagaaagccaatcaattttagaaaattaactaaaatttgatataaaagatcttttgctgatttatgttttaaaaatgaaagtctatatttcatattctctactaacttcctcctcccataccttctaattacagaggggaaaagagtaacgttggagttgaaaagcctggcagacaccatgttcgactgagtgatcagagtgagcgccgccagccatgaaacacactgaatctggaacaatggtgcagcccactatggcttctctgatagtcctgccaaaggtgcatcacctgaacctgactatgagaaagtgtcagccaaaggaaaatggagggacattctgtaaaacaactggcctgtgctcttcagaagtgccaaggccaatataaagaaaggctgaggaactgttctggaatcaataagactaaaaagagatatgacaaaatatgcaacatgtgactttcaattggatcttcattattagggcaactggagaaccttcttgggacctgataaataagtggcagtaaggtctcagtgttaatgtcttaatgttgatggtggcatgtggctgtgtagaaaacgcaggcatggcggctcacacctgtaatcccagcactttgggaggccaaggtgggaggatcacttgggcccaggaattaaagaccagactagggagaccctgtatctacaaaaaatattttaaaaaattagccaggcatggtaggtagcatgtgcctgcagtcccagctactccggaggctaaggtgggaggattacttgagcgtgggaggttgaggctacagtgagatatgatcttcatgccactgccctccagcctgggcaatgcaacaagactctgtctaaaaaaaaagaaaagaaaaaagaaaaggagaaaaagaaaatgatgcttctttttggtactattagtcgatttagactgctttaacagaatgtcacagactgagtggcttttaaacaatagaaatctatttctcacagttctggaggctgggaattccaagatcaaggtgctagcaggaacagtgtctggtgagggcacacttcctggttcacagacagccatcttctcactataacctcacacaagggagctgtatggggtctctttgacagggactctaataccattcataagggctctgcccttattgacctaatcaatcacctgccaaaggccccacctccaaatatcaccacactgagggtaaggatttcaacatacaaattttggagggatacaagtattcattctatagcaggtaggtaacacactatggtatttggaatgacagaatgtcaggttggcaacttaatagattcaggacataaagttctttatatggtacttgtaacttttctgtaaatttgagattatttgaaataatgaaaagttaggaagtttctatgaatgccttagccaagaggactccagcgcttggaggacagccagtcagtccaaaacttgaggtggaagcattccttcctggtgtggatttgaactggcaagtaatcctccattgtctctaggtaagacatggtgttcagacatccatgatctcaagtgatgtcttttaatttgactttcaatcttgttttcaaaatcagaggaaaaatattttaaatatcaaatatcttctctgcatgagcagacagggtatttttaagagaaaaatgtgtgtgcaatgtgcacatattctgaaattaaaagcaagttaatagggggattctaaaatgaattaatttataggaagctgctgaaacactatttgaatcatttagattaaatgtgctttactagacagatccacttctactgtgttctattatcagcagtagattggccctgacagccctaataaattaaactgtccagctgctgctccttcatctatctgatgcagctggtgatggcaacaagaataaaagaagagaaaaggaaaaccttagaaatgaaggatcttcaacatgatgaagaataaagcaacgtatctgcagatttcgtgaattagtgatgcctcttcaccaagttgtacttattgtcgggaacatatgaattcaaccccctggtggaagggctcaggatgagagaaccgcttctctttgcagtcagacacctgggctttgtgtaacaaggcattggcaaccacatgatgctgggtgggaaggggaaagcactttacacagcctctctagtaatgaagacagacttgcctttgcctccccaggcccagttcagtggctgtaatttgcaagctgatgagttggctttcaggtagagtcacagccaagagaatgagtcaaatgaagacatcacctgcagttgcaaccccgtttgtcctgccctaagcaactgagctagtgccaccactttccagattgatgaaaatcaaagtatcacagtttaacctcgcataggtgcccacatatccaggtcgagggcaaaacataagtgtgaaaacactgacaatttccaggcaaagacactcaaggggacagagcaggccgagatgcaaactcttcctttccttctgcaaggcctgcgtttatggtgggggtcacatggagcaaatgagtccaccaaaggcacagtcctggagttctgctgccaaccctcagccaccagtggtcaaagccatcagaggcaggaacatgagggtgtttttgcatttgggcactggccatactatcctggaagattttacaccagcaacacaaaacattaaaaatgactataaattttgacaaattttcaattttaggaatttggaaactttggcctgtatattagtcggtggaactttagcatagacattatgtcttcctgtttaaaattcaaatggatcctcaaaaatggttccaaatggagtggaaagaaatccagacaggacagatggatatgtaacactctaaatccattctatggaaggtctgtaatcagcctgtgacggtagaagtaagtgccaaatggtacttttcctttgaggtaaccaagtgtagtagcttttgttttgttttgttttaaataagacacagcctttgttttctaagaacaacacacaaaggaattaaaaacgactcaagcctgccccctggtgtgaagatagataaaagcaaccgcaaggtcttaaagtcatcttcctgaaagtatcttggtgagagctgaaatcacaccgccatacgcaaagccgaatgtatataattggctaataaacttcacagttatttttatattgaatgtcttcagaattggtatagccactatggaaggcatcaaagaaatggaagaattagcttgcatcctccagataatcattactaaacacttcccttgcatgctgcccctaggtagagcttgaatgtggccttgcacagtaagcctgtactggcagctatctctgttgtgtttctctggaattctaaaacaaaactgctgggcatggggttttgatgtggttccatcccatgactgtagaccgattctgcatggtgcagtgtgcttgcagcattattacttaagatcatatatattaatatatttagccaaatagcaaacaagggatgtacctgatgcttgaattaacaaataggcaaatataagatgtcggcatgtgcaaaagatcctaaggcatttcctttttggtctttgtagcagactctgttgacaggctacatagatgcgcttggatttctttaactgttctggcgtgtccctccctcggcatctgtgtgctttgtttctaatggtctgtgcccgtaatttattgctgtcatttgaatgtatgtgtccctccacatttcacaggttgggagtgaaatcccagtgtgaggtggggctgtcaggaggtggctatgtcatgaatgagattagtgcccttataaaaggttaagggagctaggtgggcccatttcccctccatctcttctgccacgagaggacatggcctttgccccttttggcctttttgtccttcagtgctcattcaaatggacatctcggaagcagactgtgccctcaccagacgcaaaacctgctagcaccttgatcctagacttccagcctccagaactgcgagaaataaatttttattgttggtaaattttccattccctgtattttgttacagcagcaggaaaggaccaagatattcatctccaatggactgttcttggcctattggaatccctttgcctgcataggcagagaagtggtaatgccggggagtaatatgccactctggaataggaattattttaagtggaggcaattgagaaaaagtggattcagaatgaactctctactctcctcctatctgcccaaaaacagaacataaagtcctgttgtgaaggtgtccctgcccccacccaaactgccattccaggaaggggataacggccttattatcagagaagagatggtactgagagagtctacacaaacacaccttactcactaaccctatcttttatatgtttccccatgtgtttaccttcccacaatttgccaccccaatcatcaaaagctcttttcttgtcacttctctacaaaattatccatctttgttaagatgccatataagccccaaggtctagtcacccctttgagttactcaccacggagttctcccgtgtatatgcaagctgcacgtgctaataaacttcagcctgtctgtttgtttttattgttgttcttcacctatctttcataactctaatttgcagggcctcagctgaagaacccagaagacagtggaaaaagtttttccctccctatatgggagtgtgagagcccaactctgcctcaagagagaagaaagtctaaggagttacttgtgctccagagctccctgggaatcagacagaggtgggaatttacttgagactgtccattactcacttttgtccctttcctgcctatttccttcatgcaattactagtttttcttgggaacacttcctccataaattctttgtgcaggaactaccactgtgatgtctcttctagggagccgtcctgaaaaactctgttctcctctttgcaggcaaaacaatgtcattctgccacccccatgcccctgaggcacagggtgtctggccccccatggaaaatgctgcagggatatgtactgattagacactgaaacagagcagacagcagacccccaaatctaatgctctcaatgaggcccgtcctctggggccgccctgccctcagctcctacacgcggctccagttctcactgggccctgtctgttgttcctcctggcacacttagcgcatttcctcttaatgtcgtctccgtctggagaacatatttctcagtgtatttggccgttctcacactgctataaagaaacacctgagactgggtaatttataaagaaaagaggcttaattggttcaaggttctgcaggctgtacaggaagcataagtctggcatctgctcagcttctggggagacctcaggaaacttacaatcacagcagaaggcaaaggagaaacagccatgtcacatggccagagcaggagcaagagagagagtggggaggggccgcacatttgtaaacaaccagatcttgcaagaactcactcattatcatgaggacagtaccaagacggttggtgctaaaccgttcgtgagaactccacccccccgatccaatcacctcccaccaggcccaggctccaacatgagtgattacaatgcaacatgagatttgagcaggttacaaagatccaaaccatatcacccagctacccccagaggcgctccctcaacccattctcatctttgctgaaatgttactttaccttcttggaccaccccattaccctgtcactttttccccttttctctagtttcctcatgacatttatcaccacgtgatgtttattagtttttactgtatctccccccccattagactatacaatctattaaaaatagactttattttacctattattcaatccctattacctagaacagacatgatgaaaaattgtctacaaaagtccaaagagctaatattttaggttttgtgggccatcaagtctctgtggcaactacttaactactctgccacagcacagaagtggcaatagaaaatgtagaaatgaatgagtgtggttgtattccaataaaactttattgacaaaaacagatgggatgtccattttccagtgacacgtaggaagcttggaggttgccatgccatcctaacaataatttaaaaactaaacaaacagaaaatttcaagaatcttcttagttctgtcagagaagtaaggccacagggcaaactgctcctccaaatttggagaggcagacaggaggatacagaagatcacagcttaccagagcagaaacccacaggcagaactgtccatgggaaccagtactgggtaggaaatctgaactgggattgaggagttgctgggagctcagtgtgcacaggtctgggagttaaaatctccaggagggcccaatctgagggggcacccacccttttgtgagttttatctccaggagcttaaccaggttctcacagtgactatcagagaaaaatctgttcatgcttctgtcaggaggagggaaaaagaaaccacttaaaaatatgccatagcatttagttcttaacaaggccttccctcaatagaaatcactttatcagagcttaaactgttggtttttaatttttttgcagagcctaatggacctggaggaaaataaaaacccaactccatttccccctagccaccctgtcctagctcagggaaaaactgagaagctgaatgaagctcacagtccagggcacaggctcaagacagactgggtcctaatcacaggtctacacactgagtcctaatcacagggctatggaacccttcccttccccacacctcaccaaaggcctatttgccaccgtttctgacccagtgcatcacatctggctatcaacaaacaatcacaaggcataaaaaaaggtaaagaccacagtctgaaaagacagagcaaatgtcagaaccagactcagctatggcacggatgttggaactatgagactggggatttaaaataactatgattcatgtgctaagggctctaatggataaagtggacagtaagcaagaacagatgggcaatgtaaatagagagatcaaagttctaagaaagaataaaagagaaatgcgagagatcaaaaacactaacaaatgaaggatgcttctcacgggctcattagtaggctgggcacagctgagaaagactctctgaggctgaggatatctcaatagaaacatccagaactgaaaagcaaagggaaaaaatgctgaatgaaaaaggcatagaatatccaaggactgtgggataattagaaaaggtatatgtttaataggaataccaaaaggagaagacagagagaaaggaacagatggaaagttggaaacaataatgactgaaaatcagacaccaaaccacagatccaggaagctcagagaacaccaaccacgatgaatgtcaaaattaagcctagccacattgttttcaaactacagaaaaatcagataaggaaaaaaatcccaaaagatgccaaaggtgaaaaacaccttacttccttagaggaacaaaggtaagaatttcatctgacttcatggaaaccatgcaagcaagaagacagtggagtgaaatattgaatgtgttgagaaaaaaactccaccagtctagcattctatactctgtgacattatcctccaaaagtaaaggagacttaaaggctttctcagacaaacaaaaattcagggaatttgatgctagcagatctgccttgttaaatgttcaaagaagttattcaaggcaataaaaattgttataggtcagaaggtcatatctacataacaaaagaaagaacatcagagaagaaataagtgaaggtaaaatgaaatttttaacttgttactcttaatctaacagatcaatttgttcaaaattattgtagccacaatgtattaacatatatacaaatgtgctaccgagccatgaaaagatatgaaggaaacaaatgcatattactaagtaaaagaagccaatctgagaaaagctatgtaatatataattccaaccacaggactcactggaacaggtaaaactaaggtggcaataaaaggattagtggttgtccggggttagggtgtgggagggatgaacaggtagagcacagaggattttttagggcagcgattctttatgatatgacaatggtagatacagctcagacacttgtcaaaacccatagaatgtgcaaatgaaaagtgaaccctgatgtgaactatggactttgagtgataatgacgtgtccatggaggttctttgactgcaacaaacatgccactttggtagagaatgtcgatcaagggggaggctgtgcatgtgtaggggcagggggcatatggaaatctctgtactttccacttaattttgcagtgaacctaaaactgctctaaaaagcaaagtctattaaagaaaattcacaataacctaaaacagatgtaggctagatttggccagagggctacagtttgtcgaatcttgacttagaataagtccttcgttgaagaagtaaaaactataacaaaaaccaccaaccaaagtgtgttccagttactgctgctgcataataaatcacccccaaacaactctttgattttgcataatcgtgtgggtcaggaattttggaagggcatctgctgggcagttgtcgatcactgtagtcagatattggctggggctgcagccacctgagggcacaagggccagacatccatgatgctcactcccgtggcctggcagcggatggtgactcttgtctgggggcacagctaggcagtctgctggagcaccacatgaggcctctccagcatggagttttctcaatgctgcatgctgcccccacagcaagcaacccaagaaaaccggtgaaagctacatggcctttccttttctagtgctgagaagcctcagagtaacttcttccccattcttctggttacaagagaatcaggagccagtcccacgtcaaggggagggaaggtagacaccacctctgatgggaagcatgtcaaagacactgtggctaatttttaaaataaagcaatgttgaaactacactccattgtacttctacctggaagcaggggatgggtagaaatgaaattaatatttatcactatgaaccatgcatgatgtcaaatacagtacacatgttagcccacaacaacttcctgaattaaaaagggcagttcctatattacagatgaggaactgaaagcacagagagtttcaggtgctcctcaaattacgccagtagcgagtagcagattctaatgtcaacgccagatgtgcccaatgttcatccttccagactattttatgctgctggaaacacggcaaagacaagtagcatgttgggaagggaatcagcgttctcttcggctaaagcctttgtgttctctatggtagggtttctcaaactttaacacatatatacatcccccgggcatcttgcgaaaatagattctcatccttcagggctgggctggggactgagattccacatctaacaagctcccaggggatgctgctgctgctagcctgtggcttgcactgtgggatgtggggctctatggcacagcagggtgataatacactggggtgcagtgcccagacaaggcccagagagccaagcaaagcatgcgtccttccttaggggcctgataaccttccctattctgggggcagtgagagtctaaggatagaagtccaggggtgggtagtgggtggaatgtggttgaattccttggcagtctgtcccacaatgccagtaggcataggaagaagttagaaattgccattttcttctgggaaaatctttttgtttattctttcactttggtttttctggagttgtacaaaaatacggataattgcaaaaagctggactattgcaattgtgtgtgattcagacagaataagcctgagaggcataactgagtccagaaaaatgccaagtcataaatcaaaagtgagatcaaactaattattccaagtgagtcgatggcacaacacttgtttatctcaatacataatcggcttcactaattaaaatgcaaattcgattgcatttataactggtaaccctgccaagttaaagcttcaatacatctgatgtgtgagctgtacgaacttttcagggacactaggtggcgcccgtgtacttttcttgagaaagccaggctgctttaaccatttaaaatttcaatcagtggaaagaaacgagttagcccagtggttctcaaagacattgagtcaaaactctggggattgggccccagatctgtacggtaagtaattcttcccagacgattttatttttataccagttggttaatgtaatgacattggaaacagctagcacagttaagcgcttaattgcttaattgtaatatgataaaactgaggctgagagacttactcaatttgcagggatgagacccaagaatcccaatccttttttttttttttttttttttttgaaatggagtctcgctctgtcacccaggctggagtgcagtggtgcgatctcggctcactgcaagctccacctcttaggttcgcgccattcttccgcctcagcctcccgagtagctgggactacaggcgcccaccaccacggccggctgattttttgtatttttagtagagacggggtttcaccgtgttagccaggatggtctcgatctcctgacctcgtgatccacccgcctcggcctcccaaagtgctaggattacaggcgtgagccacgacgcccggcaagaatcccaattcttatctgaacagctcttctaccaaagcacgaaaaataaaaaaagtggaagtttacatgaggtttgttgtcaaagcatcaaagatacctttaagcctctaaattgtgtcctgaaattgaagatacatctcagaagaaaaggtcgaacctatcaaaagaaacgctacaacgaattaacattcagtggaggtaatattagtataaggaaaaataaacattatgtaagcatgtgacaaataggcttgtaatgtggctctcacacaactagatgacagcatactccaaggaacatacagcgctgggcgacactatcaagggagaaggaacagctctaggaagtgccagaacatacagtaaatactacataactccaaagagtcaggtacccccccaagttttaacccctctaaattataatcaaattgataaaacatagctccactccatgtggctacagagttttctgttaagatcccctgcccagtgttattgctgagacatatgttgatacacaggacagactattacggcctggaactttttttttttttttttttttgagacagagtctcgctctgtcacccaggctggagtgtaatggcacaatcttggctcactgcaacctctgcttcccgagttcaagtaattttcctgccacagcctcccgagtagctgagattgcaggcatgtgccaccaggcccagctaatttttttttttttgtatttttagtagagatggggtttcaccatgttgtccaggctggtcttgaactcctgacctcgtgatccacccaccttggcctcccaaagtgctgggattacaggcgtgagccactgcgcccggctggaacttatttttaattcaatcatcaaatctttattgagcagggtgacaggtacagttctataagtacaagcaacttaaggaaaagctgagatgaatcgatattttcataacatatcatatgtttcaggactggaggttttaagaggaagaaaggaaggtagaaagtggcttctctcagattcttttctctctctttctttcgttttttttttttttttttttttttttttttttttaatctcactgttgcccaggctggagtgcagtgatgggatcatggctcacggaagccttgacctctttggctcaagtgatcttcccacctcagcctcctgagtagctgggactacaggtgtgtaccaccacaactagataatttttgtatttttagtagaaacagggtttcgccttgttgcccagcctggtctggaactcctgggttcaaatgatctgcctgcctcagcctcccaaagtgctgggattacaagtgtgagccactgtgcctggccagatcctattgtttactgttgttttactttaggtagaccagagaaaatagaaacaaagaaagtttggaagaaaaaagccatgactgcttttgatctcaggaaacttagctattatctaggacatggcaagataaaactgaaaaacaattctattccttccacgcttctctttgaaggagacacacttggcaaccctggccacacttctcttaccccttttcactgcccaatactctcatttctcagacaccaaatccctaacaaacttctcaactcccagttcttcctggctttttctcctgccctgtctgctgtgttcaggtcccttttaagggtgccgttggataaatatttgaacattcctaaagatgaggagctcgcctttccaaggcagccccttgcattgctggataacacatttccaagtcttgccctattgaggtaaagtactggagtctctccgtgctgccttcacttacctcttcctatttttccttccaggggattcctagaggttattaattcccctgctgtgggacagtcattcaatgtttgaagaaagtaattgtttacttccctcccttgattctttgacagaagatcaccagggctctcaaccaatcatcagtgctctcaaccaatcatcagtgctctcagacaatcatcagtgctctcagccaatcattagtgctctcagccaatcatcagtactctcagccaatcatcagatcacctgaattctagattttccatcatctcagccaccttttttcacatgcaacttgttaaacgttgtccaaggatgagatggaatgaaatggacacctttagtgtacagataacatggacggaagttctgttgtaacaaggtgggtacagaaagtgagggcagaaatatgaatcagcaacactgccctccaccacagcctttatttgcccattcacaacactctgtaattagagctagatcacatggacaattatttcccctttggagtaaacattcctagaaggaaggactcatccctgatttattcaatgttgtgtcctcagcactgggcttggtatttggctggcatttgttgaaacaaagatcctaaaagggaacaatgaaaatttgaattcaggtctcttcagaaggattgcggaaagcaggaggaggattctgggaccatcatgacctaaacaattctccctctcctccatgttcaactccagggtgtccacttcttttgaccacatggcgtctggggctgatgggcagttggaccagcaaggcttgggtgctgaggacatctcaacagagagagcttgtgggcttgcttccacctggatggggaagaggttgcgctctagctgctcatgggtggacagcaggctcaggtcctgggaagaacatggctcacagtgatatggggacccaagaccgtgaactatggcaccatggatttcccagctctggagatgtggtgtttaaaagctatacagagtctctgccctggaggttgggagagtctgagagatggtggaggaagagagggcttcctccgtgcatctcaatggggaattgacagtctgcctgcatgacgccatcagtccccaggtgtagtttccattttgtcttcctctaatcatgggactactaccacacagagaaagaaaatagccagaaaaaatatatatatattaatatattgtaaccaaaggtatccagcagccagagaaagagagagagaaagagagagagagagagagagagagagaacaatggctcagaacagattaaactcttacccaacaaaacagagctaccggaagagacagatgacaacttgaatgtaaaaagcaacaagagcatctctgttgattcaagcacgacacaaaagagagtgtctggaaataggcaattcaaagcattgattgaaggagaagatggtcactgctgagacatgaggtttagactgacaagtagaagagatgtctcaaaacctatgcaaaaatataaagagaggaaagtcataggggaaaaagagacttaacatgcaaaataagggagtgtcagaagaataaaaaggaacagatggcgggcagaatttaacaaataatagatgataatttccttgagctaaggacctgaatagacagcttaaaaaaatgtcattaagttcagggcaggactgattaaaaaaaaaaaaaaaaaagacacacctaggcatatcctgaaaaatttttcactcttagaataaaaaaagtctcttacatatttccaggaaagagagaatattaatgggctgatttgaaaaaaaaaaaaaaaaatacttatgtaggcatatcctagaaaattccttaattctaagaatgaaaaaaactcttacatacttccaagaaagaatgagaataccaatgggcttattatctaaaaacctgaagtttaaataagtacagtcctgcagttgacttaggtctgagtgtggtggctgacgggcaatggcaggccactcctcctgagaacagcccacagttatccagagagtgctcacagcctcatgcagcggggcctgcggtgttatgcctttctttggggatggtctcagctaatgacttattgaaaaatggtaataaaagtcagaattgctatctccaggtgagacaaccccatggtgccattgatactccatggtctcaggctcaggctagactggaactgaaaccacagctctgtccataatattcttcagcactctcctgcctaccttattctgtcacgggtgcctcctgagacatctccctcagtaagtcacttgcagaagaatccccatctgaggttctgcttctagcaagcccagcctgaaaggaaaggactgggaaacctatactcaaccacgatataattcactcattagcaaaaccaaaaccaaatatatacgtgattatatgttagatttaagaaagcaaaacatgatcatatattacagttatctctaaccattttgaggtaatgctaggcaagactttatccaaataacagatgatctagatcttccctttcaatatggtacccactagacatatgtgactatttaaattaaaattaattaaaataaaatcaaatcaaaaattcaattctgagtcatcctcaacatatttccagagctccatatctccatgtatctggtaggtaccctagtggacatttacatgatcacagaaagttctacggaatagtgctaatctagacattgacctcaagatgaagtaaacatgaggaggagggggaaacttgttaattcagttaattcaggggtgtccaacccgcgggtcatggacccatacccggagtgtctgttgactgttgggaagcagggagcacagcaggaggtgagtggtgggccggtgagcattaccagctgagctctgcctcttgtcagatcagcagcgacattatattctcatagggttgcaaaccctatggtgaaccaagcatgtgagggatctaggttgtgtgctccttatgagaatctaatgcctgatcatttgagatggaacacttccatcctgaaaccatccgcacccctgtctgtggaaaaactgtcttccacaaaaccagtccctggtgccaaaaaggttggggactgctgtgttaagcaacacacctggtgtgtgctcagtctgtatctctctctctgtttctctctctctttattgaattaattctgaatggataagtaagactgtctaggaatgatgtgttataaaattgctaaataagggctcttaaaacacaatatgcagaaaattctaataataatttagtgctgtatgtataaaatgagtccatcaacatctaggagttagggaaataaaagtatttcaaagtctctgtgtcacaaggagtggagaaagggaagaagaggaatggaagacatttttctaattgtctcatcttattggaatcagaaatagggaggacatattgcattttgtggggagagatacagttaatattattgggggagtgagttgggagtttgttgaaaaatatagtaaaaagggaaggtatctgatcacaacagcacagaaagtggagaatccattagtggaatggaacagtggaaactccaagttaataaaggagaggaacagaatgaaaagcaacatgatcaaatcagcaagaaataaggaagaggagaaaataaaaatgtacattaaataaagcattaagtaatagggaagaaatgaaatcaagtagatgagttatgatactaaatataaatgtaccaaattattgtaccaaattccaataaatgtcagactgaataaagacaaaacaacataaaactaaacaactatatgctgtttataagacaatgcttacagatacccaaataaaagtacagtattagactaagataggtacaaacaaagagaaatcaggtttgaaagtataagacaagggggcatttaaagttaaatgcattaaagaaactcttagtaatgcaagaattctcgcaaaacaacaggaaagttgacaaaggatttgaatatgcaattcaccaaatgaatggtccaacagttaacaagatatgaagagatgctcaaacacaatagtgaaaagagaggaaataaaaaccacaatgaaatcctccttagacctgcaaatattcagtttataataccagggcatggtgagaatgtaaggtgtgcaaccttgtgctttactggtggggagtacactggtaccgtcattctggagagccatctgtcagtacttactaaattcaatggtacatacgctttatgatccaacaatcccactttagggtcatggtatgtcttgtagtcaagacaattttaacccaatgctgaatatgaggtccaatattagacaataaaatattgtaagaaaaacataggaaaatcacaattctagagaaagacttaaacatacttatctcaaaatttggcagaaagagtttttgctataaaaataagtaaggcataggagaactgtatcagaaaatgcaacttttgtccagtcctatagaaattttagcctgtcttggttatcaatatctcagtcactgacatactcagtttcacatctcagcaagcactgacatcatgcctagcccatgacgggtattcaataatgctgaacaaattgaatgttgaatacctaaaaaaggtatggatatggtgaataccttagaaaagagtagaatttgtacacttggaaggtacttctagaaagatttttatgccatgtccaggatggggtagaaatattataaaggtaacagaatttcttccaacttatctgttttcttaaaattaaggttcatgttttctccttacctctctgtcttataatgtgctagtgttcccattatacccttgacaagtcacagcgatctcaaacacagctctgtgctttgtggaaaggccctggctctggagtctcctgagctgggtggagcacgcctcagctctgctatttgagagttgtgtgactgttggtgagtcctttgggttctctgagcctcagatcacccagtctgtaaaagaaggataatacctacctcacaggggcttagatggggtaatgtgtgttcaaatatgttactaactatgagccccagtcctacatcccaaagtgagttcgcatctcacagaaacaaacaaacaaattatgaatctgttataagcaattaagtaaggattcttcacattggtttgtgggcaacagaactttataactgggcataaaatagatgcgggccatttacatctacaagtagccattcatgaaggttaaaaaagtattattactaccactaccaccactgccaccaccacatccaccagccatctccactggcatcactgtctccacagcttccaccaccaccacttccaccacctttaaccacctccatcacctccaaaccacttccttctccaccatcaatgacctccaccaccttcataagctctagcttcaacaccatctccttatatttgataactccttcatcctgatgttctcactctctgcccggacaccctctcatttgacttgattcatgctagtttaaagctaatggaagaataatccattgaggatctacccttaattgaagagctaacttcaaatatgagccactttctacaacgctgtgccaagaagctatgcgccatgctgggtagtcccctcacatcttcccttgctacaccacgcccatggatggtgtagggcatagtgctgtgcacgggtttttggtgtgaagttatcaaaagtaagacttttttgaatttcacaatgatttttatttgtcttcatatttttttcttttctttttcttacggagaaggtcttgctatgtttctcaggctagagtacagtggctattcacaggcaccatcctagctcactgcagccttgaactcctgagctcaaatgatcctcctgcctcagactccccagtagctggaactacaggtgcatgccactgtgcctggctctgtcttcattccttccctgtgttctcctagctttgctggttgctgacaatttataggcttgtcaattccttggctttatttttattcattaacttgaaaatctgaagcgcagctgatgggttaaaaaatagtttcctgttttaggctcactgtttccaaaatcaaatcagtgacaaaaccatgaagatcataggatttggaaggtgaaaaatcatagcattcaggactgcaggtgccaccagctaattgggctcactgggctctgaaactgcaaggtaagaatataaataggccaaataactatgggtagtaattgtggattcaaagactcgacctttacataaaacaatggagtttcttacccgtttgaagacaatgaaattatcaataaaaataaactaacaatcaacataaatttccaacaataagagggttttaaaattatggcacatctgtagaattctaatgtggacacttaaaataatattgcaaatccaaaacaaacaaaaacagaaaaagaaaaaaaagaaaaataataaaaataatcttgctgtcaaaaggaaactaagttcatagtttccaaaccatatgccaaggtaccccagggaactaactgcagcgaacttacaatgctgtggcaggctattttaaaattttgaaggcaacaacgatatttaacttgtgagacaccttctaaattactagtgcatctttcaacattagattgcactacatgtattttgatgacatcaaatgtaaagcagtgtatctggcagttgccatgaccaaaaacaaacaaacaaaaagtcctgtgtgaaaatcaatgtggaacaggaaatgagggtgagggtgtggtatccaacctggttccaaggttggagaagtgaggcggtgtccagcaggcctgcacatttcaccagtgtttcagaatgaaatataagtattttgcaaatttcaatttacatgtatttgttgttatgccatacttacagtttggactgaattacctaataaatggaatggcttttatttttatttatttttttttctaggaggtgctgtgacaagttactgagaaccaagaaactttggtaacccctgaaatttggtgaaaaaatgaaatcaaaactgtgtaaatacagtcaacaatctcaccctttcgtgtatgtgtacgcacatgtgtctgtgttaaaatggtgtaaaaaatacaccaaaattcaaaattcaaaaaaaagacaggtctttatttttttctccagttttctaattttgctaagctgcctatgatgaatactcagtgctctcaagtggtaaaaacataaaaatgaaaggtttttagaaataactctcaaaggaagcacattttcttctatagataaaaatatctgctaaacataccacagggtttcatttctagagaaggtttatcacattcagctgtttctccagctttctgctctaagctaagtgggatctggctttaggacatggagatttgacgaaagctatttcctcatgcacctctccttagtgttgtttaaaaagtgctccttttccccacccctacagacttcagaaagtgaacttggcttggggtttccagccaatgaggtttccagcctcacagctcacatgtcctgcaaagatgctgctgacccatgaggcgggaggtgagggctgctaatgtcagatgctgctgcaagtagtcattgctctgcctcctgcttcatggtaggagcaatggcctgcagcactgcagcagcctgcaggtttcaggtgaaagataccactggaagcctgcccttagaaacctcacacttgaatgcacccacaagtgaaagagacctgcggtatttttccattcaatgttttttcttttccttttcttttcttttttttttaaatggagtctcactctgtcactcaggctggagtgcagtggcacgatctctgcttactgcaacctccgcctcctgggttcaagtgattctcctgcctcagcctcccgagtagctgggattacaggtgcccgccaccacaccaggctaatttttgtaaatttagtagagacagggttttaccatgttggccaggctggtctcgaactcctgacctcaagtgatcctcctgcctctgcctcccaaagtgctgggattataggcatgagccattgcgcctggcctttccattcaaatttataagaactctgagaactcacacttgtacggtttagagagttacatataaattattccaaatggtattcctaaaatgatgaagacatacatgtataatttttgttttattaattgagagagaaaatctcaaaatattgttctcttcttaaaaaagggaattttcattatactttgtacatgtgaccatttggtttgattcattttttatttcttgactgctaatgttttaatgtattaagctattcaatccttactccagccctatgaggtagtactgttatatccacttctaacagatgaggaaacagaagctcacagaggttaagtaacttgcactaggtcatatagctggaatatgaagaatcaagatttttttatttatcttggatggtttggctccagagggctcttaagcaatacattgtcactgcctctttgtaaagttactatttgtttacatagggatattcattcattaggtatgaatataagactatactcttccataaaatccaaagttacatctccaaattttgtaggaagtatagtcattttgttctcaaagctttcataacaaaatatttatacttctgttataacattatgttttcatttgtctttacaattctttctccctcactagactgtgcactctgtgaaggtgaagaccaaatactgttgttttttctctcagaacatagtaggtgcacaataaacatctgttaaggaaatgaaagctgatattatactgatagcagttgccaccggtgctgtgcctttatcccctcagtccaccccagaggccacctgcagaaatttcctatccatgctgaagtttccctgagtctctctaccacaaggtgtcctctggctgttggggaatgcatggccaagtgtggagttgccaggaaattaactcctgggagcaacgcacaaccaagaaagcttggagttggtgggtagatgtcccaacttccttgctccttgctgggctacttgtgaggtgtgctccatgtgatctcagagcatccctggcacaactgagtcggcttgcctatggggttgcctgttcatcaacaaaccaggcttcttctcctttctggcctcagtaccccattccctcagaactgtaaggaaatgaattttgcgaagtggattcttgccctgtcaagcctctggatgggaaggcagtggggaatgtagcccagctgacacctgaatttcagcctctgagacctgaggagtcagtgaagctgtgccagactcctgacccatagaaactgcaaggatactaacaaatgtgtgttgttttcagctgttatatttatggtaatttgttacatagcaatagaaaactagtatagcttttgatacctggaagtggggaactgctatagcaaatacctaaaaacatgagtattagtttgcttgggctgctataacaaaataacacagactggggtggctgccttcttacctgtatcctcacatagccttttctctgggtgggcacctctggtgtctcttcctcctcctttttttttttgaaatatttaaaaaatacacacagggtcttgctatgttgttcttgaactggtcttgaactcctggactcaagtgatcctcctgccttggcctctcaaagcgctgggattacaggtgtgagccaccatgaccgagctcttcctttcttttataaaggcaccagccctattagattagggtcctacccttgtgacctcacatagccttaattacttcttaaagtccatatctttaaacaatgtcacattggggattagcatctcaatgtataaagtttgggagggacacagttcaatccataacaatgtggaaggggttttgtaaccaggtgggtgaaggctgggggaattttgaggaacatggtagaaaaagcctaaatgacatgaacagactcagagtagaaaactggacattgaggatgctgatggtgaaggctcagaagtgaggaacactaatcggaaactgaaggaaggagaagggagaatcttttgtaatgtgaagttcggtgaaatagtctcccgaggtcgtgtggaaagcagaattgaaagtgatacttggctgtataaagatttccaagaaaagtgttgaaggaaccctctggtttcttctttctgcttgtagtaaaatgtgtgaggaaagaggaagattgggaggacaatttttctcaaaaaacagaatcagaatctgatgatgtaaaaaattccgatgatctctggatggcacagatgctaaaatgaagaggttcactctcaggaaagcatgcactagggaaaagtctgagtgagactgtagagctctttgttagaaacttagaaagatcaaaagacaaaactatgcagttacacgaaggggtcttttaagaaattaaaggtctgccctacagatcttctcaatcaagccagaaaacctcaaggaagcatatgggcatcgtccctcagtcatctcagaaggaggccaaggaacaggaaggcttatctttaaaatatctgtggatgtggcatcacctaatggagtgaactgcagtgaatccacacaaactctacaaagttcttaaggaattgtttcatcaggaatactggccacttggcctgaaagggacaaagagagtatgaaataaaggaggctttcagacccttccaattctactagcagtggaaaacatgctgataaaactactcaggatgcaaacatgtgctgcctttcatgaaaaggaagggcagaaccaagaaccctgagggaggagcctaagccacagagggccattcccatgccttgaaatgtaatcagggaactcctaacatttgcctggctggatttcagaagagtcacggaccagtaattccctttttccttccactcacttgccctcaccctgcccccattttgaatcagaatttttacaccggttatcctgtgctgtcccaccattacatgttggacaggctgggggcatataatttgtctctttggcttcacaggtccatggatggaaaggaattgtgccccaacagctgtatttaatagattactcccaagcactccatcaatacctaatcacaatttagatgatgagagtttggactttgagatgatgctgcaatgagatgagactttgggatcttgggctgggatgaatgtattttgcatgtgggagtgacattgggaacgaggtagacagaccctagggtgacccctcaatgattcccacctcctggtgatcatgcctttgattatcccctctccatgagtgtaggcaggatctgtggcttgcttctaaccaatagaatatggtaaaggtaagaggctgtcccttctgtgtcgttacatgtcaaaggtgatggaatgtcactctcatggttaacttacattatatggcaacactgatgggatatcacttctgtgagtacattattatatatatagtccaagcagactagctcttgctttcctgctagccttgaagaagcaagctgtcacgcattctgcagctgcaaagaaaagaattctgcccacagaattctgactaaataagcttggaagtggattcttccccatttgagcctccagatgggaatgaagcccagctggccccctaattgcagccttgtgaaaccttgagcaagaagatcctgttaagccatgcctagactctgaactcagagaaactgtgataataaatatgtgttctttgaagccattaacttagtggtaattgtcatgcagtaatagaaagctgatatgaaggttctcaacaggtgatggattcagtgattctagcaaacacttagacaggtaccatcttaggcagccattaaccttacaggtaacagtagtagcatccaatcagatagtgatgtgctgcttggaaatgattttaaagtgatagatttatcatcagtataaagttgacagcataatgcttccacttaaaattacacaataaaacactaaaaaggataggatttgatagttccactaaagcagcctctagctgccatcttagtgtcccaatttctataagatgctaaatgagagataaaattaaatctttcaagttccaagcatgagtgggagtcacagagagccacatgcctttcttcttttgatttagaaggattattttcagttaggtcaccactgctgggagagaagagctggggaaaagaagatgtcccctagaatatcatttcacattatatagaatttcccagctatcaaagcacagctgtccttatttgatgagttcagctttcaggagttcagagagggccactctatgggaaaccaacacagttctggagacaggcttgtgatctggggggtatgctgtttgacctaaaatatgatgggctcagggagcatccaggccatagtggagaaggaatgagtggcacacgtttgaaagctcactcatttgcttctcgttgcatgatttcattgacatttcctatttaaatattctgcctaactcacttgagaagactgcgtggattacatgcataatgaaagactctgcaaagggctctgagtactctacaactaaaaaataaagtcatatggcagtaatgatagggaatcatagtcaggtaggtatttataaagatgtccttgtcagattctcaagggagagctcatgggctaaatctgggatttctacatgatcgaatcaaaagcattccttacccacagaaataatatctgctattaatgtgctctgtggtcttaggaaaaaacactgtgcctacctgagtcttagttacacaatctacaaggtgaaaaggtaagaaggaagcaattttgttttctgacttagcatcgtttatgcacataacagtttttcatgcccaaacatacttattaccaggaggcacagtgatgtggtgattacaagcccaggtcttggagtcagataggtataaggtttgagtcctgggcctttccagttacagaagtgggatcttaaacaaatcctttaaactttctaagacttgctttccttacccaaaagacggagttactactctctaattgaaaaggctggtatggggctaagtaagatagtatcagtcagttgtcctataaggttgcacaacaaaccacccacactcaggttcatacaatgaggttggggctgggtggctctgcttccagtttcagagatgcaggcagtctgtcatctaaggcatattcttatgatgttggcataagcacagagggaaatcttagctgtccattagaagtctgctcacatcaccccactggccatgtgagtcccatgcaaattcaagggatggggaagtactcagtcctgtatgagactgtggtgagaaaaatgaaaaattgagtttatttatttagtttttgagacagggtgtcactccattaccctgtctctaaataaataaataaataactgggttcaacttagaaattgggtgaatttgcactaatcaatcatacttagtcaagacttatctgtacaactgggttaaaactatttgttattataagtgccacaaaagaataaatcttaaacattttttactctgtaaaacaccatccgatatttggtaatgatactcttgattttggtcaggcctgttgcctaagagatttcaacaaaaactagagattactacagatttgacacctgcattgccttcacatcagcttctgctctgggagtagagttggggtaaaacactcaagtggaggtactcacaggaaccctcagtatatgcggtccctgtgtgggttcttctctatcacttcctcccaggagttacagtaggggaacacagccactgcaggaatgctgggaacagcattttgaaccatgagaagaggccttcagggatagatctaaccattggtggtaaataacttttcaatataacctataactgacaattgctttaaaatggtacattcaatttgtgtttaccttggtcttgaggtggcaggagattaaatctttcaagttccaagcatgagtgggagtcacagagggccacatgccttttttcttttgatttagaaggattattttctaataatccttggcaggagattacagttactccttgatggggagtaactgagagcattcattcatgaggtctcagtgacccaattttagttgggaccctaggagcagtcttccaaatgccaggatcatggaccatgaatctccagttattctctgctggttccagggagctgcaggtgtgatagatgtgacatcacccatttgtgattacagagctgtcactctgggtaccaggatggccctgccaagaggcctggaggtgtgtggttaacattggccctcctccaaatagaagaagtggtgggtacccacagggataaattccctggggtgatactgtcttctctgaaaacatcagcttttgtttttagagtaataactaggccatgtgagcttaagtttgttcaaagtttaagaaaatcttaaagtggcttatgtaaaaccctgcaaaacactaatgtaaacaaagttggttcttattagtggttgatgtagtttgttacttttaaagggtgtgagaaagagacatttatggggaaagatggtgtgttgacatggtgcacatcaaaaaataaccacattaatataatcaaaaactgcttggctgaagtttccagattggatgggatcataaaaatgaagaaatataataaatctagctttggttttggatttcttcttttatttggaaacaagattaccttgcccacatctcctgaatttaggcaaatgagaaaatgggggccagtgtgatgtttctattccacagtctttgtggtggtgggagggctgaaaaggcatactgacactggaaggagggattccaggaagtaacaggcaccaagagaaatgtgagtgtccaagtccattgtcctcactggttttgcaagtataaaaataatataaacaactttaacaaaggatcagcaatctctcctcccgctgagggccttggttctgaagaactcaatgcagttcttctgaagtggcatttttgacaagaggttttaaaacataggtaatctgtctaatgggtttcattttataattgcttttactttgcaatgaaattaactgtctttataacatatacactctttcttctttaagaaggtttgaatttttattaaatgtcttctgataatcattaagttggaagaacttcctgcatcccaactgttcacaaccatttgactaacacacctctaacacctgcaggattacatattagatcaatatatttggtacactatacattgggtctgacccttaaataaatcaattcattttgtattaggacaatttcttgatctgagacctgtgtccttcatgcacagaggcttcacaaaatagcaaactcctgactgtggctttcaaaagtgccccgtgccatccaatctctacttgtccatctggccatatcccccacccctctccccatcatgctctgctctacccaacagatgatctgtttttcctttaaactcctcaagcttgttcctgccacagggtcttgggactagttcttcctccttcctttgaatatatccctttccaaggtcttctcctggctccattgttacctcttagaagtgccctgatgttcatccagatgagaacttagaaatgaaaaggggtgacccagctcagtgaacatgaaggcactggacttcatgttgcaaaaaagatgcttctagctcaacactatattttagcagaagcaggtctaaaagaagggagaggcaaaaacaaacaaacaaaaaacactgatttaagaggataggaaagtaatggggaacctaatctgtgagctttaagaagagacctgttaagggagccagaaaagtcatgagggggcagccccagctctcagaattgctgggagcttcactcagctaggagcatggcaaacatctggaaacagtttaaactgcttggcaacaactctcagaaagtaaaggaggcactaaaagaaataactccttctggcttaattctgaccaacaaggaagaccacatcagttatgcgtaattgagaaggaaccttggggaaaactgttaccttaggtcaaagggaaataatgctagaaaatgtcagatagttgccctgtattttgggaaagcagatttttaaaaatattaaaggaaagagagaatcccatggaaataaaactaagaaaaatgatatagctctaaatacaatgcaaaattgagcatcacaaaaatagagaaaggtagagaatttcagagtaattaaattagattcaattttggatgagctttcaacataaactacgatgggagagaaaataaaacagtggtcctcaagaatgggatggccagacctaaagatttacctctcttgatttttcctgtttttgtgaatagagaagtttttaaagcagtactcagcagcagtcgataaaaaaggaagagacagaacctcagctttgaaagattataaaataccgaagactacaaagacaaacaaaactaagtcagagccagctttgtattggtcttctctgtgactcttcaatctttaaaagataaaaagaagattgttaggaagactttgaaggctaaattagaaaagggatggtaaataaggatctaacaatttaaaaaacttcaaaacagctggtttagagaaattatatagtatacacgaaaagggatggaatattgtattcaataatctttgaaaaggttgtagagattagaagattgctggccaactagaaaagacaaaagtctctattttcatttaaaacaacaaaaaagtcagtagtgtgtgaaaggcaagttgcagaagccacagataatcacatttaatataagttccaagatagtggttctcaaactttttgtctcaggaacctcttaaaattattgaggacctaaaagagaccttagtttatattatatctattaatattcactgcattagatattaaaactgataaacttattaatttacttgagacaggttcttgctctgttacccaggctggagtgcagtggttcaatcgtggctcactgtagctttgaccacctaggctcaaacgatcctcccacctcagcctctagagtagccgggatgacaggtgtacaccagcatgcctggctaatattttttttattattacttttagtggagacgaggttttgctaggttgcccaggttggtctcaaactcctgaactcaagcactcttgctttggcctcccagagtgctggattacaggcatgtgcccacccaagaaaatttaaaacataagactataaagcacatgatccattaagcatccaccaatgaatgacattatcacatgtaatgtagcttctccattgtatacacaggaaacgagagttaaaaaaagcaaactttaattttgtagactccctaaaagagtctgaggaaccccccataggtttagaccacacttttgagaaccactgcaagaaaacttttcaccataggcccaagaagacatgaacacagatgtccatgacaatattattaatatttataatagcaaatacttgacaatatcccttagtagagaaatggataaattgaaaaaaaagctagagtaatttttaaataaattcattttctacacatcagtgtgaattaatctcaaaacactattaagtaaaaaagcaagttagagattatatacattatgacatcatttcataaaactcacatatgccgaataaaactatctaatattatttgtataattctacctgaaaattaaaaagaaatatgaagcaaatattaagatatgctttttttcattttaggtagaagctacaaaagcttttaaatattatcctctgtattttgttttttagcattttcaaatgatttctaggctgtaacaaagggaaagggtgatcattatgttgtggctttagtccacctagaacagcagttcttaaagtacatctatccatcagcagcatctgagagcttgttagaaatgcaagttatcaggctcactccagacctactgaatcagaatacctagggtggggcttgggaatctgagctataacaagcccccagggaaattcttatgaaagtctaagtttgagaattactggccaatcacaaacaaatacgaccattcaacctgccctttacataatgcatctaattcagcacagattttggtaatattgcttatgatgttctcatggacgaaatgacattagatataaaaggagtttctcaatgatatttgccaaatgttttaaagggaacctcccccttggggtattcaggttatcttggctagccctacatggcctacatggctagcccaaaagtttgggcacacaaactgttgacacaagtacaagctaacttgtggcttctggttaaatttctgacagtttggaaatcccggctggtgtaaactcacattgattataccttatgtggatacattcttttatactacttaaatcaaagtcaaagtgtggtcctcagaccagcagcatcagtaccacctggaaacttattagaaatgcaaattcttgggccccatcccagttctactgaatcagaaattctgagaatggagcccagcaatctgtgttttatcaaactcttcaggtgattctgatctgctgtatggctggagaagccctggcctaaataagtctacacagaggagaggtgtgtcctggtaagcgtgacaatgggtaagcctgaggttctaaacaggaacagctgaaatcctaactaatcaaggaagagtgttggtggcaacggcagatttccactcggaactagcttggcaaagcttgctgacaagtactgaagaactggcattttccacaacatcaggggcgacacacttcctccgttgactgtttttatgtcatgatctcttttctcattttcctttctcaatttaaaggacactttgaccaaaccaactagaatggttggttctatttaacttaaataattttgccaaaatggctttaaacatgcatgactatatccagtcttttctgcccatttattcattacttcttatttcaaggacttttttgacttctgagatatattctctatactttatcatatgtcattcttaggtgacttgtaagatttttccagagaagccattttcaaaaaatgggatcatacaaactatataacatagtttgtccccttaaaccttttaatttttacttattgtaagagtctggtagtcacaggattctgtttgaccaccaatattgtctactgtctgccagtgatgttaactgaactcatatgtggagacatatttacactcatatttggagaaagataggatttgctttatgggagtttagtgttagtatgaggtactagattttttgggtgtccttcagttaaatggatttgatcaactttactctttatgggtgagatccaacctagctggatcttgtttttgtcactccttgtctgtttttattttatttttttccctcagcggcacaattgtgcctcaagtctcatttgcagaaatccagaacctgctctatacttgagatgtatcttccagtcatcacccagttaacatttaagtgtctataactaatattttagtcttttcatttcatatggactgaatgctcatgcatttggcacaaaggctggaaagcccatactagtgagtaagagaagcacaaggtttagcagcttagaagtgaggaaatcttgctccaactctcagtgggactgattgtcagagaggaaaggataacaagccagcccacctaggaaatggaagaaattaggtagaaggttctgctaagtcccacatccacagaacatgatgtgttaccactaagatgaaagcctctttctttgctctcaaacaggacctgctaggttgtggacaagtgaaaaaccgtggtgaagtaaatgatactttgtcctaaccaaataatgcatacactctaacaagacggcacatgtcctgggtcttcagctagaatgtttattatttttttttattatactttaagttttagggtacatgtgcacaacatgcaggtttgttacatatatatacatgtgccatgttggtgtgctgcacccattaactcatcatttagcattaggtgtatctcctaatgctatccctcccccctccccccaccccaccccacaacagtccctggtgtgtgatgttccccttcctgtgtccatgtgttcttattgttcacttcccacctatgagtgagaacattcggtgtttggttttttgtccttgtgatagtttgctgagaatgatggtttccagcttcatccatgtccctacaaaggacatgaactcatcattttttatggctgcatagtattccatggtatatatgtgcaacattttcttgatccagtctatcattgttggacatttgggttggtttcaagtctttgctattgtgaatagtgccgcaataaacatacgtgtgcttgtgtgtttatagcagcatgttttataatccttttgtgtccagaattggtgggttcttggtctcactgacttcaagaatgaagccgcggaccctcgcggtgagtgttacagctcttaaagtggcacgtctggagtctgtctcttctgatgttcagatgtgttcagaatttcttccttctggtgtgttcgtggtctcgctggctcaggagtgaagctgcagaccttcacggtgagtgttacagctcttaagacagcgcgtctggagttgttcgttcctcctggtgggctcgtggtctcgctgggctcaggagtgaagctgcagatcttcacggtgagtgttacagctcatataagcagtgtggccccgaagagtgagcagtagcaagatttattgcaaagagcgaaagaacaaagcttccacagtgtggaagtggaccccagtgggctgccaatgctggctcgggcagcctgcttttattcttttatctggccccacccacatcctgctgattggtagagcccagtggcctgttttgtcagggtgctgattggtgcgtttacaatccctgagctagatacaaaggttctccacctccccatcagattagttagatacagagtttcgacacacaggttctccaaggccccaccagagcagctagatacagagtgtcgattggtgcacccacaaaccttgagctaaacacagggtgctgattggtgtgtttacaaaccttgagctagatacagagtgccgattggtgtatttacaatccctgagctagacataaaggttctccaaggccccaccagagcagctagatacagagtgtcgactggtgcactcacaaaccttgagctaaacacagggtgctgattggtgtgtttacaaaccttgagctagatacagagtgccgattggtgtatttacaatccctgagctagacagaaagactctccacgtccccaccagactcaggagcccagctggcttcacctagtggatcccgcaccggggctgcaggtggagctgcctgccagtcctgtgcggtgcgctcacattcctcagcccttgggtggtcgatgggactgggcgctgtggagcagggggtggtgctcgtcagggaggctcggccgcacaggagcccatggagtgggtgggaggctcaggcatggcgggctgcaggtcccaagccctgccccgtgggaaggcagctaaggcccggcgagaaatcgagcacagcgccggtgggccggcactgctgggggactcagtacaccctccgcagccactggcccaggtgctaagttccccattgcccggggccagcagggctggctgggtgctccgagtgcggggcccaccaagcccacgcccacccggaactccagctggcccgcaagcaccgcatgcagccccggttcccacttgtgcctctccctccacacctccctgcaagctgagggagtgggctccagccttggccagcccagaaaggggctcccacagtgcagcgggggggctgaagggctcctcaaatgccaccaaagtgggagcccaggcaggggaggtgccgagagcaagcgagggctctgaggactgccagcatgctgtcacctctcactttgggtatatacccagtaatgggatggctgggtcaaatggtatttctagttctagatccctgaggaatcgccacactgacttccacaatggttgaactcgtttacagtcccaccaacaatgtgaaagtgttcctatttctccacatcctctccagcacctgttgtttcctgactttttaatgatcaccattctaactggtgtgagaatgtttctttaagactctgcttccatctagaatgtttcttatccaatgataatgataatgatactccagggtaagaaaataagtcttagtttcatgtgagaatttttctttccccatggtgataaatagtagaagacttttcagggcacactgctcattgcattttctgggttttgtaaaaacttgggatataagaaaaataatgaaactaaacaagcagatttttttctaatcccaactttttaaagatatggtccaccttattatatgatcattagtgaagtgctagccttctcttagggagaaaattatgttcaatagtaggatatttccacatgcaaactagtagagttggttagtcagtttctaataaatatcaattgatatctgtttaaaatgacagcctccttttgttcccaaagctttatcttctcaaatatccatttttttgtgtgtgtatgtacttaacattttagttggtttgaaaagttttgaaattctaccagaaaatcaaactcacaaaatgcagaattataagactctgtattgatctttgggcagaacagactcatatgttcaataccagaatagaatgaccagcactgtgcatgaacaatggaatcacagttctaatttagtcaggtcaggtgatatttcataagcatttcccataatgtatcagctgttctctttctttgcatccctttaaaaatgtattcagttttgttctgcatattatttaaatacagtttatgcagtattcatgttaacacagaataacatattcaaatagcacagatgtctactaatataatgaacaaggaaagaatctgaacttcaagctttgtgtagattatgaaactctggaatgatccactggataatatgattataagtttccatgatgtttaactcccatagagaacttttgggcaattgcctgctagtctatagaattcttatcattctgaagagcagaagaaaactgcaatccctggattttctttgtagtaacttggcataactgaaatctttttgggtctgctttctgcttacatgtaattacttttatgagcatttattgccaaacatttcctagttacatatttaagataaattatatctgattctaggactcaaattacttgcttttatttgaaatagctctcttttaggctataaagacaaatttgaaagctataaagacaaataaatatgtgcgtatatgtttgtgtgtatatatacacacatatttatttgattatataaacatatacatgtatatgcctaaatatgcatatgtatatatatttatcaataccattattaaaatctattggtagtaaattttatatgaaagaaaagtttaaatattttgagagcaaatggaaaacaacaaaaggtggtctaatgttggtcagaggctattgctaatattaaccagagtggatggataatatgcttcagtataaagtctaacaaaaacaccatttaaagtcgaaataaaaatgtcctattttgtgatcgtgttttatgtgtctgattattcaaaaatcacatctaaagccaaagttccctttcatgggctgcaatttataagaaatggtgaaaattataatcatgaaagaataattgtgaataatctgtgaatgttaaaaaatatgtggtttaggcattttatagcttgcttataaagctgatgcagtgcattaaataagagcatgattcttaagcccagccaaagatggagccctcaccataccttcataggagccagctggatgggtgtgatgcatgaagggtccaccataggctttggcctgttggccgtatctgctaacaggctgtgccactgctggggaaggccggtaaacttctgctcttgtggatcaaacccagtatgaaccctgtgttcaaagttggacgggccagatatttcaatctttttctttttcttcccaaacatgatgccaaaacctgggaaatataaatggaaaagaggcagccatttatatcttgccagcagaagaccaggagaaagctattgttaattcactcagggcaacatcttttcagttattcctctagatcccagctgcaaaagataaaagttgagttttcagggtgtgtaaattagataattttattcaatttttttttgttccctccttaaacttgccatgtggatgatagttccctgccccattgactttgatttggccatgtgacctgctttgactatggatggaagagacagttggcaagttcagggcagaagtttttgaaggcattgtatgtttccactttttccttgtgctcctgtcacttgtcacaaagatctctctctcagggagatgacacttcctcagcctaggtcttggaaggagagatgcatgagggcagacacaagcccaacctccagtctgaagccaagaccaggcaagctcaactgagatattattgagccacggctgactcgcaaatgagaaataaatgtatgtaatgaagccactgagattttggccttgtttgttatatagcattattaaagctgaccagtacacagggagaaacatttcaaagtttggtatgtagttaaaatccaaaacatttgtggggaataaaatatatgcatacatgaaaaatgggttgataatgatagtcaccacataaaggatcaaacaagtaaatatttacaaagcacttggaaaaacatctgtcacaaagtaattacttcaagtattaattatacacctctggacaaatatacaagaaagttgactgatattacctgcagagaagggtaccaggggaagaaggcagggaggaagactcacttttcactgtatattatatttacaattttttacagtgtactttacctgtttgaaacaacatagtttacctaggtgaaacatagccagtgaccagaatacctctagaaaatatgtaaaataggcaaagtatgctttatgatgttgaaaacacataaggtaacctgggtttgcatcccagctaggtcacctattcactgtgatcccagataattgcttttttcctctctgcatctactcatctgtgaatagaacaatcatcattttgggaatccttacaacactgcatgggcattgtgaaagatgatgttttggcctacatgttgatttgttgaggaagacttatctcagcccttggactggaataggtaggtcatatattcctacacttcttttttttttttttgagacagagtatcgctctgttgcccaggctggagcgcagtggtgcaatctcagctcactgcaagctctgcctcccgggttcacaccattctcctgcctcagcctcccgagtagctgggactacaggtgccctccaccatgcccaagctaatttttctgtatttttagtagagatggggtttcaccgtgttagccaggatggtctccatctcctgacctcgtgatccgcccgcctcggcctcccaaagtgctgggattacaggcatgagccactgcgcccagcctatcttcctacacttctatgtatatattcttcacagcatttatccacttgcgattaattaattacatataatggtgtgctcagtgtctgttttaactactagaatgtaagatccatgagggaaaggatgcttcctgctttttcattactgtttgcctggcctatagtagggctcacaaaatatttgttgatggactaaaatcaccctgaacagcacatttattcagtaaatagcatgtgcggttggagctccatgttctctcactctcccttctttacttcccttcatcctctgttaaaactgttacttcttttaaacacttgtccctgtgtggtaagcagggtcttcccatgccttccagttttctcaagttccttttccatcctctacctacataaatattctctcagcaatgctcagaccattcacagccttcactccctggactccgtcaaaacccatcgcattcattctggttgttacttcagactaatttggaagggctgtaatgaaaacggatgaaagagtataaggacttcaactaccttgatatattacctttcctggaaaatatagttataacttaaaacaattctgtaagtactttactacaagtaggtcaataaatacaagtcagctgaccttaaacgcttgggcacacccaaaccaaagtgtcaagaagtaaaggaaccctgctgtcatagactgctgcagagatggcccacaatgtttcattcttcctggtatccatgccttcaaggaggactctcccacactgactctggacttggatatataatttgctatggccagtgagacaagagaaaatatgacaccaatacgcactgtgcctgcacactgtggcttgtctgccctcttgctgtccttagaaacagcagtcagcatgaaaacaaagccagcctatcctgctggaagatgaggggctgtgtatcccagttacctgtctccccagccagcaactagtcgaccctgagaagcagagctgcccagctgaccagcagctatccacatgagtgagcctagtcaaaaccagcagaactacacagttgaactgaacttaaaattatcacttacagaatcaggacacaaataaatgtttttttgctttaaaccatgctacacagaaagagctaacataacaaaaaccctgattatcatcctctaccttgcatcttcagatgcttgccatttttaggtttctattttagctgcttcaaagtttcaagtaacaacatccaatctgggtaactatattagctgttacacaattgagtgctaactcaaaggagttttgattgtgatattactatctggttgaaggcctggaatgttttcagtggcaggaaattacaccaataattagctctatacaccatctctctaaattatttagtgagcataaaatacatttgaaaatataatttggccatttgttggctgagtccgcttgacagttcaagaaattttagctatgaccattttttaaaaatgcaagatggaaattatttcagaaacatcatttgagaagagttatttggcctgtattcatacctgaacaagcactgaaaatgctaggccaaatatttttagaggcagaatagaaatgtcttattattccctctctcattgtgaatttcccagtggttgctatgccactcaatgagagcattgaaaagaagatatcaatgaactaatactgtttctgtttttaaataagagagttgcggagaggaaatccacagctgaattaatctacctacactgcattgtgtgatacagcacaactataattttaatggtcaaacatgcagttctacctctccagtaagtttgagttaaagagttacagaggaacaacttaaaaggaaaacacaaaacagctctaaatcctgaagcaatattcctgggaagttcacaggtgcagagacaaaatctccaagatttattgtgacattctatcagcagtggctactactctgttagcaaggaggaggcccacactcagctgaaagacagagacagggtcctagtgccttttagcaccatgggacagatggacgcctagtagggaagtgaagatcttcttggcagaatatttcttctctctgatgtgctcatgctcagtctctacctactagggcactaaaagttcaatgcgtctcatcccacattcatggtagccctctgtcaggggtcccaaagaccacccccaggcttgatgattcatgaggagaactcataggactctgcatacagtcatactcgtggctgtgatttattaccatgagaggatacaaaacaaaattagcagtgggaaaaggtgcatggggccaagtccagagaatacaggtgcaggctttcagaggtcttctcctagtgaactcacacgggttgtggttaattcccccaggactgattgtaacaacacatgtaaaaagccatctactggggaagcccatcagagatgaagggcctgaggattttattttgtactggtcacataggcaccccttgcttagtccatatttaaattccaggaggaaaacaggggttgaacataaacctctttttttttttttgcataaacagtttaggcacagcaagccattctttatcagggaatggtgaggaacttgctaaaatccaagttcccagatgccagccaagggccaaccttgcaaataggctttttttctaggatatgcatcctgaagcctactagactaactcttttctgcagaggaggtgttattatcatcgccctttcatagaagaggaaacagatgctcagagtccaggttagaaacttgtaaaactggagatttagaatctcaaaacacaagcttttaatcacttgtgagagcaatgtatggctgccctgtatttaccttctctgccagttacaccatcctacctttcttagggaacccagttggtgtggatggtgaggtttcttgggtcctgtcatgtctctccataaaggccctctctgagaaattacaaactgtgtcactgagcaggtgaagctgagcagcctctcctacagaagaaaagatccctactgctcagcacccatgtaaaccaagggcacagcatacctccttccactcctcagtgtccagcagacctaattcatgacagctgtgtaggtatgtttcagtacagaaagttacataggtttagaagtaggcaattcaagaattaatttgaaatatttcttcatttctttgtttcattattaaacactttattatttgtttcagtatgtgaacattcacctggcagtttgattcagcattaaccaagttggctccttagctaaataagtttgggaaaaaatgaattacataaggtccctttgtgggacatttcaaggtctttattatgctaatattagtttagttcctagagaaggatagtaaacagatcccagaatccttgtttctgaaagtttactgcaaaactcacagcaaacactgctttgatggatggtttcagtcaccctatgttcttctatgaaatataagtcttagaagtcatagaagagactgaaggaaatccagatccccagactctaataccccatttctgctctgacatcttcatggttatctcagccctcaacctgttctcagggacagcccagctttgtccctaacttagtgggttgccctgccttaagcatatgcctagtctaaaagctccaacatgcaggcatctcccaattcaggtctctacgaacaggcatagggagtagggagtcaaagaagaaataacaggcaaatgcagcagcacctggtactattcgagtcatgctggttggggtgatggcgcagcacctcattagggaccagaagatgctacttaaataatattcatctaggatgaactgtgtgtcagacactgctctatatgtaccaattcacatattctgttcacagtaattcatattgtaaggactattattatttctgctacacagataaggaaactgaggcctacaggagttaaaaaaaaatgtgcccaagttcattcaagtaggaagaaactgaaatggaattcaaaacccggcagtccacattttgagtacaaactggtccatgctctgctgacttgaatactagtccagcccccatggtgcagcatgctgtgtagccctggcagcctctctcagatggagagtcctccattctacatggagttaactccagatatgcatagctcctgtaattgtttggataactcaatgagaaggtattagaagaaagccctacaagggactggatgatctgaatgttgcttccatgatagacaagggagtggttaatactgctcataatatctgcttgcaagggagactttgctggttcttctgaattgatacactacaactctctccccagacccagattcagtctcttctcttctctgtgcctttaagttgatttatatgactgtgtcactagaacttccttgtctttggtttctagggggatttgaccaattacaggcaatttgtaggtggagaaagaggttgggtatttattaccctggttttctttgcaaaattcccttgttttcttgctaaacttatttctctggttttcttgccaaaattccccaatatttacaagcttctgttgccattcccttttccctccagttttccctccagttttcagtccctgtggggctagatgtgacatcttcctgcagtttttagtttgtgggtattcctacattttttattggttctcagaaccttgcttatatgtgctaggtaaacccttctggagtgcaccttctgcttcccgccaggactctaactggcatgtagcatacttgtggggcttatggtccccacttcccaggactcaccagcaatgcctagggactagggaatatccacaagaagccaccacccattaaaaggggccaaagtcttcattagccatatggagacccccgtttcttgcatgtattcctttataactattttaaaaatatttttgttgccttatttttctcttgggcataaagcttgaggtgttcaaaaaagcaagatgggcattctgtgaaattactttctttacaaaattatctaaagggtaacggcaaaagaattttatcaaacaatcttattgcctcctcaggcagcccattttctcattaatttagggttctggttgaaagcagggacccggacttcctggatctgaatctgagtcctgctacatttatcagttctgcattcttgggcaactggctttgcctccttttgcctcagtatcctatgataaatgggaataataatattctccccctcagtgggttgttgtgaacattcagtgaactaagacatgaaaagtggcttagatctgtgtctggctcctagcaagtgcaatccaaattaggattttagggaatggagtaggaactctactataagccaggtccaatcagtggctgaagtgccatctctcatcacatcaggtggacacgcagaggtagaggagcagctacttgacccctattacaaattgagaaggttccagcattcttcaaccttttcaaaacaatgactcatggctcagtcctgtgtcccacccatggcaacattttaaggttaatgacatggatggtggtgatggtcacacgaaagtgtgaatgtatttaatgctactgaacagtacaataaaaattggttaaaatggtaaattttttgttgtgtatatttcataataataatagtaataaaagataatgacatggatatgccccaggggctttgattgcctgggaggaagtagttggcaggcagaagccatactgaagacggggtggggcacgcacaggatggggtggggcaggcagagcaggaggtcacttattagaaaatccttttgtccatatcccccctcaaaatctcaaattgtaatataacatttgggattaagaaagaaatatgtcaaactgtgttggtctaataaagtgaagagttaatataattactgaactattaaggtttccagtcattcagccagctagagacatggtagaaagaataagaccacagaattttaaaatggtgactttaacgtacctcttaagagtgagtcttttcttattgactccctcacgaagagagatttttcttttcttagcctcagatctatttttcagaacttggtaaatgtaataatggaaatttaagtactttagaaatacctacctgtgttcatataatttaggtttaatgactggtccttcacttacgggagaaaggtgactgtttcagaaatcacattacagaggggatggcaccaaccacaccatcccctttctgagatgtcattgctcagatatacatttattatagcctcagaatcaagaacaaaagattctccagtcttttagctatgctgattttagggaaaatgaaacatagattacatatttgggatccataggaaaatctaaaaatcttgggatgggttcatcatataatctaaaaataaagttgttttctaaaaaaaaatcattatgtgtcaaagttgttataaatgacatagtttcctttccttggattcatctactacagtgtctcctaataggacccattggacagtcactatgttccactgggtgcttcccactccaggagaaactgtatcaaagcctgttgggtgaatacaatgattatccttgtacctggtccccatttctattgcacagatgctcattatccagttgctttgtgacctgggcctgtttttttgacctggatcataattcaaacacacttgccttctcaacaggtgtagaaacagctgtaaccccttttcttcttttgtggatctgattctggcttctaatttctaccactgggatgtaaaccccgacttcatacctgaatctttgtttcttatttgtccttctctacttctgtgaatgtcttagacccttccctctgatcatgatgtttggatcttacctgtctgctggtttcttcttatctaagctttctgattctgccctgattctgaaatctgtgcccacagttggatttagcatatacatccatctgaactgcacactttttagaccctcaacatcatcagacctttctgctctaactcctcgcttcaactcctcaccctggcttcaactcatccctctcaactttctgcaatatccaatatccagtattgacaaaaggcacactttaaggaaaacatatttaaatttattcatttccacattggcagaatgacaacataatattgagataatagcaaagagaaaatcatgggttttagagtaacatcaatgtagtaagtactcagaaaaactgcatggaaagtgtgttaaatataacaatcaaaagccactacttcaccatggtttcattctttactataagtttacttctcctttatgccaatgagcccaaatatggagacagagcccaaacctctctcttaatctctgtgtctatgcttccaaagctcctcttggattattctcatttttgacactcagcatctccaaaacttaactcatgatctcctacttgctctgtttctttcctacatatctcaatccttatatagatagcatcccattgcattaaattgtggaagccagttctgagagttcactttgcctttctcttctgcatcatcctgcacattcaatcatcatcaattcctatccattctgctccccagatgtctactacatctatacctctctctgaattcccactgtattagtttcctaaagttgctgtaacaaatttccacaaacttagcagcttagataatgcaatgtattttcttacggttctggaggttggaagtataacatgagtctcacctggtaaaaatcaaggcattggcaggggtatgtccctttctggagtctctagagcagaatacatttccttgtctcttccagcttctagaagtcacttgtattccttggctgatactgcatctctctctgactgttattccatctttcccactttctttttatttttcttttcttctcttttttttttttttgacagggtcacgtgctgccccccaggctggagtgctgtagtgtgatcttggtgatcttcatgatcttggctcactgcaacctctgcctcctgggttcaagcgattctctggcctcagccacctgagtggctgggattacaggcatgcaccacgatgcccagctaatttttatatttttagtagagatggggttttccatgttggccaggctgttctcaaactcctgacctcaggtgatctgcctgcctcagcctcccaaagtgctgggattataggcgtgagccaccgtgcccggcccatctttcccattttcctctgactctcttattttgtctttctcttctacttttaaggatgcttgtattatattggaccagcctggataatctccctattttaaagttatcttattagcaaccttaattccccttacagatttcagggatgaggatgatgacgtcttgctggagatgtctaccacacccattgtcactgctctctccatgtcagcatcatttctctctcaggctactataaaattatctagctcagtttcccttcaactaaacttgcccctcccaagcagttttccaccctgtaggcagacaaatcttttgaaaaatataagtctgtatcattctctttctctcttagaccttttctatgacttctcaccgaccttaaaaacaaaaccaaactccttatcagagcttacaaggctcctggggaccaccccttggtacctctctaactgtataaattccttctccctttcattaagccttaccatccttagtcactcccattaccttaaagcccctcatcccctctaacttctccctcccctgcctgtctccaccctctcatcttgaccctcacccaaagtctcttttctggtctcagatcaaatggaacttccttagggaggccactttagaccccagaatactttttttcttacttgttcccacagttccttgtctattgggctacagaaattatttcaaattacagacatgcatgaacacattctgtctaccctgtccacgccaccatcatttctctcttgggctattacaaagttatctagctcagtttcccttccactagacttactcatccaagcagttcaccaccctgtaggcagaccaatgtttctaaaatgtatgtctgtattatgctctctctcctaaactttttctatgacttctcattgtcattacacacaaatccaaaccccttatcccagctcacagttgtggatggttctaacaaaaagaagcatacaaaacaaaagctaaaagggaactactttgttcctatcacaaagtttcaaatccagaccattttctatttgtttgtgttatccctgcacacatcctgattttttatacataaacataagaccactctaagtacattgtgtgggacttgcttttttttttgagtcatttagcctatttggggtgttatgttaaaaaaaaataaaaaagcaaaccttggctatctttccatatcagcacacatatcacttgcttctaaagtctccatagcattttataaaatggaatgtactataattcatctattgattcttttattgattaacatttacgttctggggctcttaaaaacatcattcctgtgagaactctgctagatgtatctatcattctgcataaatacgagcacatctgtggcatagattgtcagatgtggaaataatggagggaaggcatatgtattagtttgctagggctgccaaaacaaagtaacacagattgggtggcttaagcaagataaattttattctcacttctggaggctggaagtccaagatcaaggtgttgggagggttggtttcttccgagacttctctccctggcttgtagatgacttcttccccctacatatgactgtgtccaagtttccttttcttataaggacaagggccatattagatcaggggccaaactaatgacctcattttaatttaatcatctctttaaagtccctacctcccaaattcagtcacatttggaggcattggaggttaggatttcaatatatgaacttgggaggtggacagaattcatcccataagagcaagcatgtttaaaacttttttaaatgctagcaagttggctttcagaaagcctagatactttcctttcctatcaacattgttggaaatcaaagttggtcttccttagcaagccgtaagccccttaatttcattttgatcttatctgtgcctggcacatagtagatgagcagtaatatttgttgaatgaatagtcactgagacaaaatatttcccttgatagagacaattcatggttcaagcagagtggcttctaacaagcagacagcacacagggtgagatcagcagcatgtgacaggaatgcatcccaaatgcttctaaggaacccagataaacacacagcttttcaggggcagagtggaagagagaggacccagtcctctttgattttttccttgtatgtttttatcactcctacaaaaatattaagtaactacttctgtataccaagtactataggcaaggtagtggtgtttgagactttatagagtagaagggagaagaaaaaccaagcacagtgaagtctagagtcagtcttctgggttcaaacctttgttcttctacttaatggggcaaattacttaatctctttatgcctcagcttttcaataaagtgcagctaattaatatctatgtcaaatgttgtgaacatttaatgagttaatacttgttaagcacataaaatactgcctggcatggaatgagcattccataattgttagctattattattattgtaaaggaaagaaataaaatgttaagagagatgaagagtccacaaatctctccatactatcttcacaactttctgtgaatttgtaataatgtttttaaaagtacacacataaatgtacactttacttgaattgtaccccccatttgtacatcttacatagttagggtaccatatcaagaccaggactttggctttggtacaatgtatgtatatatgtctatgccattttatcacatgtagtgattcctgtaaccaccagcacaatcagtgtatagaactgttctatccccacaaagatgtgctatacttttaaagttacatgttccctcactacccccacaattgctaagccctggcaacctgtaatctgttttctatctccacaaatatataatattgagactgttatataaatgaaatcatagattatatgaccatctgggatggtcctgtttccctctcagcacgaggccctagcactccatccacgttgttccatgtatcaatagttcattcttttttattggtgagtagtatttcatggtatgcatgtaccatactttgtttaaccactcactcattgagggatagtttggttgtttctagtttttggctattacacataaagctggtatgaataatactgtacaggttatttttttgatcgcttgtattactaatatttttatattggttatatattaaagtggtaaacattttagataaaacaaaacagattaattaaaattagttttacctcttttgtgtttcaaaatatgactactggagtatttaaaattaaagatgtaccttacattatatttctactggacagcattatgaaagtgtaacttgtaggagagcagctgcaggcctactcgtgatacagatattgggttgggaatgctttgagttcagcctttatggataaaaaggggcaggtcttgcgaacttgaaacagagcattccaggcaaaaggaaccaaggataaaggcctcaagagagaaaatgatttgccttgttcaagaaacaaaagcagctcctgtggctgaagcaatacttatttaagaggagaatgaagtggtccaccatctgtaaacatcgtctagatagtcccagattctccagatttttttatattttacatcaatgacactaatatccaaatacacccatctactttctgaaggtaatgactaggaaaactagataaagtattttcacagtaagtcttttagcgaagtagggtttccccaaacagatactggcccatattttaatcctggaaatatcactgttatttgtttgtttaaaacttactgggaattatgagtagattagttgatcagttagctttggctgcatatcacaccatcccaacatttagtgacttaaaatgacaaccatttatttggccccaaatactgtgggctgataatttgtgctgggtccagttgagtggttcttatggtcttgcctgtgtttattcatatattctgtggtcagctatgggttgtctggaaactgactggtctaggatggccacatggactctcatctttcagcagggtagcatgggcttgttcttgtggtggtatcagggttctgagagcacagaagaaatacctcctaagacctaggctaggaaaaggcacataagattggttccactagcttctataaacaatgaaagctataagaccaacgcagattcaatgggtggggaaattagtctgcttttcaaagggaggagcttcaatgtcacattgccaatgattggctactgtgagacatagagaattaggattatgtttgcaaacgaccacaataagtaacagtggcatgcttctaagtggttaaaaactggctatggaaaaagggtaaacaaaccctgattgtaatgtctgtcaacttttatggtgcaaatactgtcacatagctaatttcaagctaccaatgtgacattgcagaacatttttttaattaaaaaatatttttaaagatgagcacaattggctctcacaagctcatgtgagccagctccagatacactaagaataaaccctaattctggtagttggcagaggaatgctgtaatttctggaattcaccactcaagatatcacactgagatcttctgccctctcttaaaaaggcaattgcaaggagctacatgtcccaccaacaggtaaaaagccccccatataattgggtataaagactttagaagtctttgcaacagtaactatgagatacgtggtaggtgttgttctcatctaattatcaaacttctcaggtgattgaaaattgtattgtgggtgtgtgtgcatgtgtacacacagctggcaatcaaaatgagatcttccataaatcataactggaaacactgtcaagtttaacaacatcagagcctgctttctttccttcaatcttcaagaatataaaaactgatgcataggaatttcacatcaagccagagaaccttatgtaaccttaattttgctttatttagattggtcagatgggtcacacaaacacttgcataattctgctcttttccatctgagggtcatatgctagcaccacctcctggtgagactatgggcttcatatgggcaactgcaatggtgttcgacttatttccaaaaataagttactgctaccacttgtctgaaaacctcagagctgtacgttttcttaaagttatggtagaaataagttgtcaagctgtccacttttaatgtcattgattatatgaattttaaacgatagagtattgggtataagaaactttcctgttgaagaagactgggccaaataagaagggaatttgctgttacgagtaaagaatggaatcttctgagtagttaaatactacaaagttgtagtacaattttagataaaaaatcatagttctttagggttttgtttgtttctttcttttaaaccactagaatctgtcattggatattgccttgtccccaaacaatctaacattctgagcaaatagaaatggtagtcctgttgacatgtcagcttcaaactgaactttccatgtatagaaacccctgctatggtgtataagtctcaccttctgactcttctcttcatatttgcttctctataacagcaagtatgccaaagggaaagggcaagaatgggcttggtttgtgcagcctaagtcagatgaactgagagtcacaataagagaagcaaaaacaataataactagcctctgactgtcactcccttccaaatctgaagatgcccacttctattgtaaaatcttttcagattctcacttacagcctgccacctgaggctctcaaaccccagaagaacctgaggataatcctggcatgagggggataaaggcaaccagggcactaaaggctttcagaattatacggcaaaacagaggcactgcacgtggattacgcagtaaactggctgtgggcaagtgacaagtgatttgcattccaagcaaaaatctgtggtagattaagattattttaattttctctcctttctctcttcccttagggctctctccatcttttctttgacaagtattttttgtgcacctgctgaagccgggcactgtccatggtactgaagacgcaatagggaggcagacaaagatccttaccacccttatggggctctcatgataggagagaaaacaataaacaagtaaataggaaaattacgtagtatattagaagatgataaggcccgtgagaaaaaaataaaagcagaaaagggaatggcgaatgctgtggcaggggaaaagaatttttatattgtgtggatagggatgagaagatgtccttaaattaagaaggtgatatttgagcaaatatttgaagttagaaaggataccgttcattagagtatctggccaaagagttctagtaagagtcaacagcaagtgcaaggcctggagatgtggatattcctggtgggttcaaggaaaagcaaggaggcttgtgaacctgaagaagggtaagcaaagggccaaacagagggacatgagacagagatggaacaggaagtcaggccgcacagggcagtagttcttcaagtgtggtcgcagaccagcagcatcagcatcactggggagcttgtttaaaaatgcaaattttggagttccaccacaaacctactgactcagtagctctgaggggtggtgcagggagactcagccatccattttgacaaagctctccagatgattctgatgtgcactcaagtctgagcagctgtgattgagggcatcagctgccactgcagggctttggttttttttctctgagtggaatgaaaattgatttgattgtttaattacttaatctaaaacaatgatttcagttttgatgtaattaagtgattgtatggtttccaggtatattcattttcctagaccacgctggggctcagaaactaataccccaaaatatggcattttgacatgctgaactgaagaagcctcaaggatcctctggcctccctccctccaccacccaaagtctctcccaaagaagctgaagttcctttatctgcctaagatccagacccaccaaggtgaacaattgtttttttcttcctttccctgttatctcattatctgttgcagaaaagaagaccaagatgtgaccacacctgagaagaccttttttatgggcataatgaattgtctccaatgactatgtaaattctagagaaggctatttacaagttaatatttattcccctttctatcatttattgcccctcaatagaattattcttctcccacctctcataactggtcttaccaggatacaagctcccattctttctttaacctcaagataaaatataagtttctgtaacctattggaagaggggtcttcattctaaaggcattttagaatgccttcattctaaaggcatttatttaatgcccctactaaaggcattaaataaatttgtatttcttttctcctattaatcaatcttcctcacgtcagtgatttttcagtgaatctttaggggccaaaagcctatggctcctacaaccacaaaaggtagcacagtgaaatgatcatttaggatatgtctccttagcatggtctcctgggggctttcttcagcccctctgggctcttctctggacaatagctggtcctggaagacagaaggcccttcagataactatatactacaatagaagcttggggtttatctgtagaggtcttttactatgattcttgaataattttggcactggaattttaatatatctaatttataatttagcataatttggtgcctatgtgatgggaaaatcagcaaaatattgtcagtgctatacaccatgcattgggagttaataacacttgcatttccaactgtgatcacttcttggtcatcttttctaagataacatgatgatgttcaccatgttcaatcaatatgattatgggaatgctggtttaggatgatggcgctaacaagaagactacctaaaatgtcaccagcaacaacagcaacaaaagcttcacaatgtttatggatttcacatgctcccctttctgtaatctggaactcaccctagaaattagctgcccagcttacaactgggcaaacatgtgcccagctccctttgcatccaggtactgccatgtgacttatcctggccaatagcatgtgcacagaagtgaaataattcacttccagattagggattttatgtaggctggatgcagagaagaacaaagtgcaggggtggtggtaaaacttcaaggtagaaggagcctggatccctgaactgctgtatggaggaaatccacttgctgaccaggagcacctgcactggacttcatgcaagcaagaaattaaattctactggactaagctaatgaagttctggggtctagttgttataacaatgggcattactctaatatacttatcatttttttttctgataacaacactatgctgtcagcaaatagcattagcctcacatcaaagagaaaaaagctaagtatcagaatgaaatcacttgcctaaggtcactcagctagctagtggcagatgcaggattcatgtcaaactcctctggcttttaatatatgtttattacattatatttaatgagccaaggaatggaatgcaaatataaaatggcaacaatggtggttattagccactatgtgaattttcagcagtaacatttttaaggaagactgtcagtcaatagagttgttaataaaattatcacatagtttagaagatggattctattgtaatacattatagcagattaagttttgctcctttaaatgtataaatcaatgaagcaaaaaccattgcaatggtaaaatctgatgtggtttggggcaatattttgtttttacccaaccttgattttagtctagaagttttacattcctacgaagcaatcccactatgtgactggccccttgttggtctggcaaaataacatcgaggaaggaaatattgctagaataataactcctaatttctgtgcttgaagctgtgtctaagaggtatttaatgtgaagtttctagtgaagtttatttaaatagcattgtcatttccctctctctgttatgcataataataaacctttgaaattcaaatctttgaaaaatgccaaaatgcattttcctcttcaacttaatactactatttaatttgggtaagtttgtagaacagtgggatctcaggcacttttaaaatggaaaggggcttattgatcctactttcagtaatgtcagatttatgaaatatgtaaactcagcaaaaattacccttccctttggaaatgtaaggcaggactacaccttggagaccatatccagcaggctttttctgagctctcgagtaaaggtaaggaatcttacattaccattgagagggtcagttttaaaatatattccctcagtaggagaagatgcgaactttttgaataacacgagtgcttaaaggtattgctttatatttctacttttctatgtgtaactggcttttgttgcctcccatttaagaatcacaaactagaaattatccataggctcatcagtagtggaatgcataaataaattgaggtatattcctacattgcaatgctacatagcagggagaaagaaccatttggaaaagttcaatgaattccacaaacataaagttgattgaaagaaaaaggcagctacgaataagtgcatattttacctcatgatgggggattttataaataggtcacaggcagaaagtcccttccatcaggattacactgtaccatagaaagagccccagatgacatatcagaatggtcaacatagagtgacgtgtcttctctggggctcaattatctcacctgagcaaggctccatagatcctaaccaagagtgtagagctttaatgtaaactgaaaggaactcagcatttccttttctccctaaactgttcagtgggttgacaccctctttataaagaacatgagaaaagtcatcacaagaaatgcttcaacctccaatggttccctccagtaaatcagacctcagtcagtcccatccagctctaaaattctatgattcttagctgttttgggaatcaggactatggaaatcaacaaggcatatatcaaaaatggctgacaaactgcaatattacagcatctatactatatttatctacccagacacaaacattttgattacacaatggaactttgtcagatagcctttaacccttagggaacatcatttcgtttttataaaataaccaagagatttgctgctgctgtggtttttaattatttcgcccacattcttctgtagttatcgtcttgtgtcctaagtagtaccaaaggcaatattcatgcttggatgatagttattgttttaaaaaatggttcatagccttcagcttcatgttacatattgtagcctcataaatacaaggctaaaagacatttacaatcagaaaaacatccattgagatgctgccttgacccataaatgtctaattattttactaaaaaaaagaatccctcaaaaaatgggtatggcaggcatattttggtactacaacttgtgagtctttttgtttttttaacaggcagagtcttgttctgttgcccaggctagagtcatgatcatggccctgaattcctgggctcaagtgatcctcccacctcagcctcccaagtagctggaactataggtgcacaccaccatgcccagctaaatttttctgtttttttttttttttgtagtgatgaagtttccctgtgttgcctaggctggtctcaaactcctgggctcaagagatcctcccaccttggcctcccaaagtgttgaaattataggcatgagccactgtgcctggccaacttgtaaggcttgaaaggacaactggatagtcaccattgtgtatcagttattaaaatgctgagttatttgataaagcaggaaatgtggcattcaatttaatatctcatccacccactcccctgggcccacaaatccattcctcctggccacatgaatgctggctggagactttaattttcaaactcccttgctgctagctgtgaacatgtggcaaaattcttgccattaagataagcggaaattatgtgtgacttctagcttttctttctttattttttgagtcagggtcttgctctgtgacccagactggagtgcagtggcatgatcacagatcactgtagtctcagtctcctgggctcaagtcatcctcccacctcagcctcctgattagctgggactacagttgcactccaccaggtctcaatatttcttttcttttctttttttttttttgagatggggtctcgttatgttgtccaaaagctgaccttgaacttctggcctcaagcaatcctcctaccttggcctcctaaagtgctgggattacaggtgtgagccactgtgcatggctggtcatttttctaaagatatagaaatgcttgccctgcacttggcccctatttttccttcccactgcttagaaatggtgataattagaagaaccttgaaaaccatatcttaaggatggcagagcctttcagttttactggacccctgggttatgttgtggactccatggcccaggctattaagaaagagaaataagcctccgtctttaatgtataggatgttgtaagactctttgctacaatatctcagccttttccttaactagcctgccaggaaagtgctttctgtttagttgtaaatgagctgaagaagaagggaaggaggaagggaaaagtagagttcagcactatttctcagaataacagaaatgagaaagaatccgatataactttacaaagatatttacagacatgccctccatttgagggcataacttgagtcatataattgaaattagccatttactgtattgaaacaagcatgatatagcctcctgactgcccacaggaagacactaatagcaagctggagtccagtgacaataacagaaagaatgaaaggtcaggcatcattcttcaatgcagtgagaacttggaaaaaaaaaaaaaacttcaacaaaagcacaacaacagcaaaaggcggaatgaaaaaaaaaaaagagaaagaaagaaagaatgaaaccacaaaaacaaaaagcaaaaccaagtaggaaatactaccgtggagacaagttctgttccacaacattttgagttatgacattagattgcctgatcaatgatacccatttccttgttctccaagtggccttcttacttctggctacaatgtctccccacctccaccaccataagctcagatgaacaagaaaaaacaaaacaaaatgcaaaacaaaacaaaacaaaaaaacaaatagcaaaaagttgttgagtgctttgtatgtgtgtttgtatctgtgtgtatgtataggtatgttgcttgtcacattgatttttagcataactctatgagatatggatgagtattgttactattcttagttttagatgaaaagatgacaaccttacagtgaatcagtgacagatctagtcttccacattcttaaccatgatgccacatttctccctctcagccagggcagagtgtgatagattaaacatggctgcaaattttgtgtcccttctttcattaagatgtagagtagatcgggcatagtggctcatgcctgtaatcccagcacttgggaagccaaggctggtggatcacttgaggtcaggagtttgagaccagcctggccaacatggtgaaaccctatctctattaaaaatacaaaaattagctgagcgtggtggtgtgcacctgtaatcccagctacttgggaggctgaggcaggagaatctcttgaacctgggaggcagaggttgcagttagctgagatcgcaccattgcactccagcctgggtgacaagagcagaactccatgtcaaaaaaaaattgtagagtataattctcctcctcttcagcctggaatgcctatagtgactgtggcagagttatgctttgccagtctgtgttcaggccctaagagactagcagcttccattcactatctcctggagcacttgctcttggagtattgagttcaactaccctgagtattgaattcaactaccctagccatgtacaagtgctccagtcaacagtcccagctgaacccaacccttcatctgttcccaccaaggtctacatatgtgaagctatcttggattttccagaaagttcatcttctagttgcataccactggggaagctctaataataccctgtggaatataaaaatcacccaaccaaatgttgatcaaactcctgacccactgaatcatgagatatcataaagttgtctttgttgtaacactaagttttggggtcatttgtcacacagcagtagatcactagaacatagaatttcgtaacttaaagcccataatgtatatatgcagatttatgtatgtgtgtttattccaaatggttccacatatgaaatgagaaattgttgcatgctctgttagtaccttttcaaaacatttcctgcctaatgtgtttaatagtatctaaaatcacttaagtaatagtagcttgccagtattaaggatattcatttttgaatatatggttaataattataccaaatagatcagaagctgagaaatggaaatttgagtagaatctccttgaaccatttgagtcatgacagcttccactgagaacaagaggaaagaactattttccttaagaattgctttttcacataatttgtcctttaaaaagagaagccgcatgttagggtatccatctaagaatttaaattcatagctctctcatacaacctaagacaatagcacatgtactcctaaattcatactgaaagcacataaatccaaccaaagtggtaatagaaacctaaacataaagcatgtacatatctatgtctttgttttttcagaggaaattttgagcctaatggagtattttcattttttttcctttgtgatatgttgcctgaagaatgtataagggagtctattcttgcctgaatttaaatccttcatgattagatgaaaaatataatgttatgtttatacacaaagatgatatctacctgccttcagcaggatgccagatcatgaaggctgagtcatccactctttctcatttgccctttcttataatgaaggaaaatagccaggattaggtaagggagtcaacagatggaccagtaacaaggggactggcgacttggaaagggaacctgtgaattttacgagagcataacactgagaacgagaacgacacttttgcatattggagtggcatgctcaaaccaataaacaaaagcatgttagaagttgtatcagctgttcctggataccagggtgctatttacttgactgacatcatcacctctgttctactgataaattttattaagatgctttcagttttgttaatttgatctggatctattaaggcagttacctaagtgcagaaataaaagggaatatccacatctatactgggcattgctggggaaggcacgaggagcctgcatgcagatcagcactgactcagtggcctcctggtgcccaatatcatggcatattcgagagatcttttccttggatccacaggatcataagagacatttttaatgtataatggaacacaaaatccaaccttgtgctgattgtagaatcagtggacatgtctataataaaagtgatttacaaaaaatattgttatattcataattacacatgctgtaatgcaatatatgtaacacatcttttaagacacacacagcaaatattcaaacagtgggcaatatccatttttggaggtaaaatgtcatttggtttttattttagatctagtaaaaagtgtatttaggatggtttctcttgaactcagattaccaatatatttacttgctagtttttatttcttatatacttatctatatacacatgacagtgttacatatataacaagcctccttctagaaatatcttaaagaaactgaatttccctttttaacttttattttaagtgattatgttatttttaagtggttcacatatgccttttcttctatatttaggtgcaatcatatcaaaagtcctcctctactttgcttggactagaatttctttttggattaaaatttgaggtttttgtaggaaagtatatcaaaaaataatattgtttttctcaagaaaaagagagaagagctttatctatcatcatctaggcaacatccaagctgagagcatctctgccttggtttgggtactgagaagtggccacaagctaattccaattttgctttctaatttaccctacgagaagaaacccagccaagcctaagttattataaaggtacacctcactttatttttatttttatttattttgatttttaaaattttattattattatactttaagttttagggtacatgtgcacaacgtgcaggtttgttacatacgtatacatgtgccatgttggtgtgctttacccattaacccaacatttagcattaggtatatctcctaatgctatcccttctgcctcccccccaccccacaacagtccccagagtgtgatgttccccttcctgtatgtccatgtgttttcatcaattcccacctatgagtgagaacatgcggtgtgtggttttttgtccttgagatagtttcctgagaatgatggtttccagcttcatccatgtccctacaaaggacatgaactcatccttttttatggctgcatagtattccatggtgtatatgtgccacattttcttaattcagtctatcattgttggacatttgggtaggttccaagtctttgctattgtgaatagtgcctcaataaacatacatgtgcatgtgtctttatagcagcatgatttataatcctctgggtatatacccagtaatgggatggctgggtcaaatggtatttctagttctagatccctgaggaatcgccacactgacttccacaatggttgcactagtttacagtcccaccaacagtgtaaaagtgttcctatttctccacatcctctccagcacctgttgtttcctgactttttaatgattgccattctaactggtgtgagatggtatttcactgtggttttgattagcatttctctgatggccagtgatgatgagcattttttcatgtgtctgttggctgcataaatgtcttcttttgagaagtgtctgttcatatcctccacccactttttaaatggggttgtttgattttctcttgtaaatttgtttgcgttcattgtagattctggatattagccctttgtcagatgagtaggttgcaaaaattttctcccattctgtaggttgcctgttcactctgatggtagtttctttcactgtgcagaagctctttagtttaattagatcccatttgtcaattttggctttcgttgccattgcttttggtgttttagacatgaagtccttgcccatgcctatgtcctgaatggtattgcctaggttttcttctagggtttttatggtattaggtctaacatgtaagtctttaatctatcttgaattaatttttgtataaggtgtaaggaagggatccagtttcagctttctacatatggctagccagttttcccagcaccatttattaaatagggaatcctttccccattgcttgtttttgtcaggtttgtcgaagatcagatagttgtagatatgcggcattatttctgagggctctgttctgttccattggtctatatgtctgttttggtaccagtagcatgctgtttgggttactgtagccttgtagtatagtttgaagtcaggtagcatgacgcctccagctttgttcttttggcttaggattgacttagcaatgtgggctcttttttcattccatatgaactttaaagtagttttttccaattctgtgaagaaagtcattggtagcttgatgaggatggcattgaatctataaattaccttgggcagtatggccattttcacgatattgattcttcctacccatgagcatagaatgttcttccatttgtttgtatcctcttttatttcattgagcagtggtttgtagttctccttgaagaggtccttcacgtcccttgtaagttggattcctaggtattttattctctttgaatcaattgtgaatgggagttcactcaggatttggctctctgtttgtctgttattggtgtataagaatgcttgtgatttttgtacattgattttgtatcctgagactttgcagaagttgcttatcagcttaaggagattttgggctgagacaatggggttttctagatatacaatcatgtcatctgcaaacagggacaatttgacttcctcttttcctaattgaatgccctttatttccttctcctgcctgattgccctggccagaacttccaacactatgttgaataggagtggtgagagagggcatccctgtcttgtgccagttttcaaagggaatgcttccagtttttgtccattcagtaaaaggtacccctgactttaaaataggccctgttcctgtcaaagaactcctgatccttaataaaaatcagccacacactacagaaatctagataagaaagagctttgttcctagtctctgaatgtggaatttgttgaaggaatgaacaaatgaaagaaagaagagagataatcagcgaggaaggacaaaaaaaactagattttcctacagaggtaatcttgatatagccatatattatagattaattcagcttttgaaggcagcctaggaactaacgcatcaatttttaaaataatttccatgaaaattttttactccaaattatgcttacatgacaataactggaaatgcaacccatttatatacataacatttaatgaatgcctgatatatttcagtatgtatggttattttatttaatatacatgtgaaatcctggcacatactagatactcagtgatatagtttggctgtgtctccacccaaatctcctcttgaattgtagctcccataattcccacctatcatgggaggaagcctgtgggaggtaattgaaccatgggggtgggtctttcctgtgctgttctcatgatagtgaataagtctcacaagatctcatggttttataaaggggagttcccctgtacacgctctcctgcctgctgccatgtaagatgtaactttgcccctccttcaccttctgccgtgattgtgaagcctcctcggccatgtggaactgtgagtcaattaaacctcttgcccttacaaattacccagtctcgcgtatgtctttattagcagcttgagaacagactaatacactcagtaaatcctaaaaagcaaaaagttgaaaataagtatctgttcaatctcagaattacaataatatatttcctttccttttactttgcccacatatacagataggaagtatagatacaaatagatggctcttgaacagtagtctgcatttggtaattcttgagcagcaatagcttcacctataaaggaggcagcaaatgcaattcctgcattagatgggaaatgtctattagatccttgaggtcccttctgactctaaggtacagagactcaaagaataatgctcacctccccttctctctacctattcatctttatgcaaaacaattgcccatatgaaaggaaaaaaataacatgggcaagagagaaatcttaacattaagtgacagacatagaatgtttttagtgtgtttgacatattattacacttaaaataactacaaaataccagttggccttcctgttataacagatggaagaaacctggcacctaatccttaatgtgtttccaggaaagggattcaaattgtgtttattatcatatttactggaaaagaaaaaaaaagaattaaaaaagaaatgaatctctcaaatctctttccttaaataaaagcaataatacttttaaataggtgcattccaagagaacttttttcaaatgctggacatgtgtcagtatctgtcaatagagtagccgtgagctacatggaggttttgagcactggaaatgtggctgctgagactgcagagttaatttttaaaattatatttaatttccattaattttgttcaatttaaataaccacatgtggctagtaacttccacactggatagtacatctctaaagccttggaggttatatgttatctgaggagatgtcaacagtatttataaatgattctactattatttatctggttgatttaatggcagtttatctgcctcctaacttttcctcttatctgttctaacaataatcaagttgaaactgttctttgagctcctacttgtccatcagtatactgtattatagtttttatgggacatttctgcccacagaccccctctgggaaattttcccttgcccacaatcctaccgcatggaagcctaattgttgtagacaacatacttgccctaccaacccccagcactcctgggagggccactgaccccagtgcagtctgctcataagctgcccaataaggagcttaaaatctggtgagaaaagttaaactgggctaattggaaacatggatttagaatcagaaaactaggagattctgctagttagcatgcaaatgggactgatgtaatacattttgatatgttgtgctacagaagactctgggctgcataatggccccatgtaaatgggaattatgaggaaagaaaagccccaaaagccaggaagtctagcagcagaaacagaatgagaatggcacggccttgctgaagggagtaagactgagtttccaagtctgcttctactgtggcctatttttagctatccttgagatccacagttctaacaatgactcctcaccctttttttttcctgagctaaccaagagagtctctgattactaagatacatagattcaacaggcatatgtggaattgaaccctctccctgcctacccctcaaaaagaacttgagaccctatgtgtcctgaagtcagtgtacttggggatcaatactagaggaagaatacgatacaagctttcttatatgtttccctctgaggtacttccctctatagatcttgctgtggagtaatctttgacatttctttgacattggaatcttaactgattttgttatttgaaatgaggaaagtcatatggaacaggctgagatgtcctggtttggcagacaaaggaaggcaaaatttggcaggattcttgctgccttaagttgagtatgcagaagcagagcctgaagcagtgatttaaatgctcgagatttattgagggagtgctttcaggaaagcagggcaggtggaagtgagagctgaacaggctgtgacctgagctggagtctagtctcagtctaatatcaagggaatatcaagggaactctggagcataagctgcctcccaggcaaagggagcttgtaccccatgtcagtcatgtttgtaacccatgtcagtcatcacctgtgagttcagcatcttgggtggagatgcttccattggctgagagtaatgcctcagagaaggagctagctgcaggtcattagtagtcagcactcacagcagctggggtggcccaaggagggggaactggggatctgggtgagccacttacaacatctgctgcacaattcctcctaaataggaactctggctcctgaggaaaacagtacatttacaaattgtttgtattttaattgagtaaaggggtttcctcagactgagaattgcaaggctatggagatcctagaagctttctgagtagacagaactaaatatatatgacaaaaaataaaagaggagaagagttaaaaaatgacaagttatgacaaaaaataaaagaggagaagagttaaagcagtccagctgcatactgatagaagcacagaggagattcttttctaatgcaaggacaataaaataaggatcatacagcttgggggtgacaaagctctaacttaaaaccaaaaggacaagtaggacctcagtacttagcacacagcatggcatacagtaggtgcttttaaatatttgttcaacatttgaataaatgaatggataaaacttaacaggttaataattaattttatttatttattatttatttatttattttagagatggagtctctctctgttgcccaggttggtcttgagctcccaggctcaagcaatcttcacacttcagcctcctgagaagctgggactacaggtgcatggcaccatacccagctccaattaataattaattgttccaaatattcatttcttccccattctgttacattattcagttcacattcttaaaattaacatttatgagaggaaggcatgtttctaaagaagaaaggcaaactatatagtcagccaaaatatttatggataacaaacaaattagtcaactgataccatgtgtcttgctgcttattctgttagtcacaaggctatttggtgacaacttgttatgagcaatgtttaatttttaattctgtaacacttacaacatagctataattgtaaattggtaaagtaaggcaacaaaaactgtgtattagtttattttcatgctgctgataagaacatacccaagactgggcaatttacaaaagaaagaggtttaattggacttagagttgcacatggctggggaagcctcacaatcatgttggaagacaaggaggagcaagtcacatcttacatggatggcagcaagtgaaaaaagcatgtgcaggaaaactcccccttacaataatcatcaaatctcgtgagacttactatcacaagaacagcacgggaaggacctgcccccatgattcaattacctcccaccgagtccctcccacaacatgtgggaattaaagatgagatttgggtgaggacacagccaaaccatatcaaactgctttaggcaatatatgaattatttaaattgggtcaatctatatatttaatgtgaatactaaaatattacacttgatctttttataaaattatgatttattatttttgaaggacctaataaactacaattacaatttctacagaaagaaaaataagagagagtttagtaggatcctattcctgggaactgtgtgaatattattgatgtcattttttaacaaacaggaaagaaaacaggatagtttcaatttcagctttgctggaaaacatggttgggaagtgagatagagggagaaagggacttgttctgaattctgaattgtgttttctcaatatgaaaataaaggaaagtctttaggagaatattgaaaaggtagatcagtatacacacatacatataaatatgtacatatacatgaaacactgtcctggctttgatatgaaatcatcttgattggtgataattcaatacccagaaggacaaagaaactttgttaatccactctcaattgtgttcacagttttgtatatttgctgatatttaatatgcttatgttttgtgcattaatgcatatctgatattctgacaataaaattagagaatactgagtccaaatgggtgttggctagcatttcagagaccctaacattttatcattgaggaatatctaaagacagaggaaaataaatatgttttcctgaaaaccacagggaaatcaaaatcagggtatgtgcatgtgtgtgtgtgtgtgtgtgtgtgtgtgtgtgtgtgtgtgtgtttgttgttataattattttgcatggaagacagaaggaaaggaatgtcttttttaaaaatttaaagcaataaaaatattctctttcacttcataatgtattcagctttaatatgaagctcaggttttcctccacacttgggatctctcttccaacaaatctaatgtgactcagcattctaataggatgcatcacattcagaccccggcttctgcactccagcctcggcataacgctctgtccttactagagggagtagaagagctaaggctgagcagctcaggcttgtagactctcagatatattggtctcttctttctttttctactttgattttctaggagcagggcctgcaccataggctgcaacaggtggccttagacatgaaaccctgggtgtgaccacacttaagtttagaaaaaaatgttgattccagcaacccctccattgtaaacactcactagtttccatttacttgtagataaaagtctgaactcttggaacatcagccaatttctcacctgtgtgttcttaacctcatccagaatggctatgaccatttggatttcagtttgaccagaaaactgttaactttatcttttttaactgtgaatggaaactgatattttcctaaattatgcatgtaagcaacagaccataatcgtagtagcagtacctgtgactctttcactcatggaaatcacaggtatttaaatatcataggacagtatagtggctttcttgaaataccgtttatgctcatcaccacttaaaattgtagtaggtattaggcctactgttaggtcttgttatttaatgtgttaataaagaagcatatatgctatcatattacaattttttcaactttctgaaaacttcaaatacctatagttgaaattattctgagaagggaccatgggctcatcagattgccatcccatggcacaagcaaatgtcaagatcctgtctctagcctcagtttctaccaatcctctctaccttctctatgtttctgctctaacaagactcattttttccaaaatagtctttggttgttcacaaccttgtgtcttgatctcatagctccttgggatctttatttctgtgggaaattgtgcccttcgagaatgtattagagagaacaagcttgaagaagctgtaattgtccattctcatactgctaataaagacatacccgaggccaggcatggtggctcatgcctgtaatcccagcacttcgggaggccgaggcaggtggatcatgaggtcaggagagcaagaccatcctggctaacacggtgaaaccccgtctctactaaaaatacaaaaaattagccgggcattgtggcaggcgcctgtagtcccagctacgcaggaggctgaggcagaagaatggcgtgaacccaggaggtggagcttgcagtgagctgagattgcaccactgcactccagcctgggtgacagagcgagactccatctcaacaaaagaaacaaacaaaaagacataccgagactgggtagtttataaagaaaagaggtttaattgactcacagttttacatggctggggaggcctcaggaaactcacaattatggcagaaggggaagcaaacatgtccttcttcacatggacagagaagtgccaagcaaaaggggggaaagccccttataaaaccattaaatctcatgagaacttactcactatcatgacaacagcatggaggtcaccgcccccatgattaaattacctcccactgggtccctcccacgacacatggggattatgggaagtgcaattcaaaatgagatttgggtggggacacagccaaaccatatcagaagccttagctgatattcccaggcagagtctgaatacacagttgacccttgaacaaaacaggtttgaactgcatgtgttcacctagatgcagattttcttccacctctgctacccctgagacagcaagaccaacctctcctgttccccatcctcctcagtctcctcagcataaagcgaggatgaagatatatacaatggtccacttccacttaatgaatagtaaatatattttctcttgcctgtaatttttctcagtaacatattctttcctctagtttactttattgtaataatacagtatataatacatacaccatacaaaatatgtgtcattgactctgatatcagtaagacttccagtcaacagtaggccataggtagtttaagttttgggggagtcaaaagttatgcatggatttttgactgtgtaaaggtcagtacccctaagcctcacattgttcaagggtccactgtctatcctttgtgcttttaagattcttggtacatgccttatcttcaatcttgagaacattttatgtctgtgcatctgtctcttccattatatcttatgtttctggatggtaaacaccttttttttctcatctcccaactcctggcatagtaattctcatattgctgacattcaaaagatgcttaagaggtcaaggtgaggttattttcctgggaacaacagataaacaaagcattataaatagggcaaaacagtagagtcgtgcagtgatgtggcagacccatttagtttcaaggacaatctctgagaataatacggtgctctcatttcccaacatcactgcttcccttaaaatcaaattaagaattgatttcaaataaaatcccaacagaacaaagcatgtcttcatgtaataaacagggctggctccaggcaaaattgtgatggacaaaagcgcatctcaggaatgctgacatcccttttcatcagccttgcttttcttccatgaaggtgccatgtgcatctgcatagcaggtcctctgggttctttggacatactagtatgtttagggatattccctgtggcatgtaatctaggcctgtcctcctaagagttcagatttgtttctactctctctttttcaaaacctacctatgtgatccgttcaggcagccttgtgctgagagctaatggatgatgagtttcaaatcaggcttcattcactgattaaacaatggctactgagcactagttgagcacttcttaggtgtcatgtgccaggtgctatgccacagagataaaagcatagtctctaccatcaaaatgctcacaaaaggagatggatcactgtaatttagtaagttaaagttatatcagcaagcacagatggggccctgtcttagtttgggttctcagaagctgatccttaaacaagagtttgagtgcaagtcctttacctgagatatctcaggaggaatggtaagaacatgaggaagtgagataggaccaaaaaagcagccagtgcagagcatatttccaacaggttactactgtcagcaactggagctcggtcctgatgagggtctctgagaggtggtataggttgtaccccagggtggtcccatctgaagggcaaggaagtgggacatttattcagcaattcccattttttatgagttgggaactgtacctgacacattaactccttggcatttctaccctgaagtgtgcatggccctgagcatgtttctgtgaccagaaaaagtcctccggagagaatccccagtgtttgcaggaagaagatatagacatgtagaggaatgttaaatgctaaggagtcctaactgggtctgctccagaccggagcaggggtgctgccaaagaaggttttcccaaggacaggctgtctgagaggtgtcttcaaaaagggacattcctaccctaggataggatcagcgttagcaaatattttatgtccacttcagaagaatgtgtattctgcaattgttaggtgcggcgttttatgtatggcaattagtttaagtttgcaaactattttgtcaaatcttcttttattccttttggtttgtttaacagttaccaagagttgtgaatttgccaatgtctccttttaattctatcaatttttgcgtctatgttgaggctgtattatttggtacacagatattaagaatcgttatatctttctggtggaatgattcttcaataaagtataatacatttttatctctaaaaatgcttcttgccttaacattcacttgagtttttatgtaaacttagctgtatcggctttttaattttatttttttgcatggtctcttttattagtattatttctccaacctctctgtatcattatatttaagggatgtcttttgtaagcaacatatgcttcttatttcttttttatttcatccagccacacattctgtatttcagttgaagggtttagtcccttcatatttaatgtaatatagacgggttaaaataaactatcttgcttaaaagatgtttcccccaacttgtcctatctttatttttctctgctttctggctttttgggtcaatcaagtatttgttatcattccttttcccccttctattagctagataattgcatattattttgcttttctttgaataatatccctggagatggcaacataaatctttatctctttatagccttttttatgttagtaagcttactacttcctgttcaatgtaagagccttggaattgcatttgcttcatactatcttttgtaattctttacaaactgaaagccatttattaaaacattattatttaatatagttaatattcatttacatttattatttctctcatactttattcctttctgcatgtctgtgtatccctccctcttgattttctctcgcttaaatttctccttttacttcaggtctcctggtgaaaaataccctgtttttgttagtctataaacacctccgttttacttaatttttggaggcttcttcactatatagagagtcttaggtttccttccagaacctaaagatgtaattctattgtctgaaaagggtgttgtacaaacgcttccacctacaacgagaaaagtttgacaatttattttgaagctatgttgacaggtactagaaagctactagggcgggctgggcgcggtggctcatgcctgtaatcccagcactttgggaagctgaggcaggcggatcacgaggtcaggagatcgagaccatcctggctaacacggtgaaactctgtctctactaaaaatacaaaaaattagccaggcgtggtggcgggcgcctgtagtcctagctactcgggaggctgaggcaggagaatggtatgaactagggaggcagagcttgcagtgagccaagatcatgccactgcactccagcctgggcaacagagcaagagtctgtctagaaaacaaacaaacaaacaaaaaaacctactagggcagccagaactcaataggtgaggatcttggtgagaaaagaaagatgtgaggtgaatctgacattctgagcttcatttcctctcaaggcgtttcctcacttagaagaattacagattcaaaacccaagctgtgaagcacaaagcagtggccaaaaggttgcagcactgaagtgagcttgcaatggttttattggtctggggaattacaacttgaatattaggactacaaacactcggggacccaaggtcctggggaaagggaaaacatattgaggtgaaccccacaatctgtgccactttatgttcttgaggttctttatgttcttacacaagttctttatgttcttaaataggtgtaagaagggaagtctatgcctatatattcactttgatggtcaaaggaggcaagagggggttgccatattttgtacagctcctcatccattggaatgacaacatcttgtatatgggatgatccacaggtgaagtaaaaatgtctaatgatgttcaagctctagaaggtagctttatatattctgtgaaagaagctgtaggatttactctaactccattccagacattagggtgctaggacttaaaacttagcgcttaagtaatctgcactctcagaacacttggatactaatagttgggctgatactcttccctttagggaccgaagtgaatctatattgttcactagaaatctccagagcaaattccacaaaccttcttaggaatgctgttcaaatattcacacacactccctcacatttctatttacccaaaaatatctcatgctgcaatttaggttcctgcctctggctctgttctccgaaggaatggaaaaatacatgccccacagtcggtgaataattatatttctacatagagtgagactcggttagctgtccttttgggaatgaagtttctacacactagctcattcatgtggaagataatctgtatttctcagaaatttcagaaagtgatgctgcctatttgcagctgcaatgtaatttccattaatataggaccagatgaaggtaaatacaactccttatgagatattataaagcctgggggatctatcttctgcttctttttccttcttcctcttctttttcttcctccttgttgtcttcttacacatggatttgtctgagatataaagttgtgaccaaatcctttccctgtttatcctgggcatatagtggattatgtttcccagtctcccttgtatctaggcactggtagatgatgtgagagcaggaggagacataggccagggtatttctttccttttccattcctgtttggtacctttttttgttttgttttgttttgagacaggctcttgctctgtcacccaggcaggtgtgcagtagtgtgatcatagctcactgcagccttgacttcctgggatcaagcaatcttcctgtctcagtctcccaaagggctgggatatggtcatgtgactgagtgaggccagtgaaatatgaatgtagtgcatttacttgacttcttggaatggtccagaaaattcccctgactgatcttagctttctctttctcctcacatgccagttgaatagatagttctctgcggacagaggagagtggaacaaaagcctgggtccctgatggagcatgtggaagaagactgccaacaagaaccagtcccattggactatgaagtgaataagaaataggactttattgtgttaaaccattgggaatttggactgtttgtcatagaaggtagccaactgtgactacagagatactggaaccaggagctgtagttgttaggagaacactgactctctggaaataaactgtttgggctcagattatggttctgccacttacactagttatgtgaccctggaaaactccctaaggattatggttccaggatgcacactggactggagtatgaagaagaaactcctattgcattaaatcactgagaattttgaagctgtttgttatagtgatgtgcctgctcagattaaatcagagggcattgaagatatgaaagtcaagccatgaaagacttcaaggaagggcagtattcaaggtttagaaacgtgcagaaaaaagctattgataacttgccagttttctttattatgaagcatgtggacatactggtttgctaatgtaacatgatgatcctcttttccttcctcccggggacatttagatgtttgcactgcatcctgcatggcctctgttgctttctataaatgcattttttttctattctccacttcaatcaaaaaaactaatgaccaaactgattacactcattcctgctgaatgtttcttcagttaggcattagtatttttaagcctcttaatagcttttcctcctcttttccaggaattctaataaataggtagaaggttttcttaagactaaaagctggctggaaggcagatctgatgtccactggggatctttggggtggaagtggggagtatgcctgccttggcaaatgtccttcattctcagaggaggctgctgtatagaggatctaaccagattttctcctttccttctcctaggaccacttgccagccccaacttctcaggactataaatgcactctctccttccagcccttcatttaatctctttccttcttgaatatagcttgattctaacatctctaaaaatctgaatccagcacttcccttgtctttccatagcactgatctcaggcttgtgacacatgttctctagcacactgagtatctttttaagcattttctaactgggtaaaccttatgtcacttcaatttttgctgactcagttttctcatcttacagttttcccccttggtgactggtgtctgagtgggttcttctaaagttcatattttgaagtcctaacttccaaggtctcagaatgtgactttatttggaaatagagtcattatagatgtaattagtttagatgaggttattaggttgggccttgatccaatatgtctggtggccttatagaaaaggaaaatatggacacggatatacacagggagaaccacaaataatcatgaagaaagagatccacaggacaaggagagtaaaagattgccagaaaacaactagaatttaggagaaatatgtggaacagattttttccctcacagctctcagaaggaaccaaccttgctgacaccttgatcttgaacttccagctccagaacttggaaacaataaatttcataaatttctgttgtttaagtcacccagtttgtggtactttgttatagtagccccagaaaactaatacaaaggggataacagtatctgtataattgggatgttctcagaatttcaagaggtgatatggtactcatagcacagtgtctagaacatagcatgtgctcaatatcagctggtactacttctgctagtacttatctactgaacatgtcatgtcaatgacaccctctgtgttatgaagtacagccccattctgcctgcatccctggcctggaagtttctgataaaaaaattatcatgttggagcccaacttcttgattagcaaagtgttgctacatgcaatgaacaatattaattggtccttcagactgcttttctttgagctaaataagccttaaataattttcttaatgggtctcaatgccttaatttttaaatcatctttgtagtggcaaaaaaaggctttctaaattcttcagtaatagaatctagaatctgatgtgctctcagcaggagccaagtcaccagtgtaataaacaggaaaaccatgtgggctatttattctttgtgtgctttgccaaatccagtatctgcccttctctgtgcctcagaagctgacccatgtggaccatttgacagagactcccttggtgactggtgtctgagtgggttcagtcactgggaggcacaggtagatgatgtgagggcaggaggagacacaggccagggtatttccttccttttcccttcctgtttggtatcttttttgttttgttttattttgagacaggctcttgctctgtcaccccaggcaggagtgcagtagcatgctcatagctcactgcagccttgacttcctgggatcaggcaatcctcctgcctctcccaaactgctgggattacaggtgtgcgcccctgcagcccactttggcacactggaagtagctgcatccttctatgattacagctcctgtgaaaacacttgcatcccctatccccttcgacctaggaacagtaaaggcttcctgttgctgctagtccctggaggcctcaacatcttttgtttgcttccatacctctgcaggtaacccttgcattgagaccccttcgtctgaaccacctgggatggattccctttcttatctgtgtcctgactgatacattcttgaagtttaaagttgcccctcatgcagatcctgaggcaagcatcgagtataaggagtttatttgggaagtacagggaccattgttagggaagcaaagatgtaatatgtgaaagagaagaaagctaattaagggtgagctggtgagccagtgactcagtgtgtgactgaggctcagttctgctagggaactctgagaataggtataaagcaagtatttccaaattatctcacctaagaggcaaaggagccgccccctcctgagagattaactggcagagagctgctcttggggactgtgttagttcactgaaacctccagcctatcttatgcccaggctgtatagctttgctcaggatggaaaaaagaggcctcagccccaaggctgcccatactggcagctgagagcaaatggaaaagctcaatgtctatgggtggcgctcagagagcatctactgcatatatcaagtctgcgtatttttctttttagatacagtgccaagattctcatttttaggaagcttgagtcacatcatccctcctggatatcttcaaatgacactttaacttgtagtttatcattttctgtctaacttgtaaagtatttcccctgcccaatcatggtcccttgtgctctttatttttactggattttattctaaaactccaattttaccatatcattttgaattctgatttccttcactgcctaccaaaaatattactttacatgatgctcatcatacaggggcgtctttgggtattaactgggtcagagtttctccaggtttcatgtttttcaaaagcatggggccagacatagaaatacatggtgattttgaaacccgcacatcatggcttcagatacggccaaacacttttttttgaggcactagggtgagttcatttgtccattcaattaacatttattctgtgtccaccatgtgcccagcactgaggacacacatagatgcacagaatagggaatctttgtccccatgagcactcagagaaacaattacctgaaaaagcaatgatctaattgcactggggtataaaaagtgcttagatgaagagaagtcaagagagggaggtgtgtgtgtgtgtgtgtgtgtgtgtgttatgtgtgtgcatctgtgtgtatgtgtgtagggattatccattccagaattgaatgctgggtccaggaaggctctgagatgtggggaaagggttggatggattggcgatggtgggggcagggactgggataaggatgtgctaaatatataagcagacaccaaggtgagagagaggccagagccctttggggagacggaaatagtctaaaactggccagagaacagccatggtggaaaccaagggcaggtacagggtgaaaatgcagatttaaacagagggcagactttgcttccttcctatttccaagctagacttcttctgagagtcccatgagaagccagcaggaaatgtcttgcttcaaacaaattctacttcccacccctctgcctgcctccccaacaccacgcactttgtgttatttaggagaggacagagaatctctttaaactcgagcggcttcttcaaaggagacctgaaataccccaaggcctataagaacagagggaaaacacctgtatgtccactcagttgataaccaaccctgactcaggtccctggttctcctgctgactgcccatctgtccttggtgggcacaaggctcccctgcttggggcttctttcctgctgctgatagcatccttgtctgcccagtgatggccccttcctcttatcctccaagcaaagccagggacaagcagagaccaggaaacattggtaattcctcccaggacaccaagaggttgaagctcacatagcatgaacacaggatggggtgaggagtgagtcaggggcactccaacacttcacctgtgcagctctatgcttcagtttccccactagcaaaaaaaatctggagttgttaaatgtgttgtcatatgaaacaatttaggacggtgactggcaaaaacgtgtgctatataaattctaacttacatttttctagttagtcctactcagtgatgattctcagattaccaagtgatagaagcctcaattaatataaagtaccactgcaccaacgtagtttcatcactgcagatgcagtgacattaatgtggactcagtcatatgattctaaatgagcatcctgaatcattagaaaatagtcccatcacaataacaacttcgtttatataagagaagtgatatttcaaattgttcccaaagaaccgccagcccttattgcctttgtttgtataattaacgtctgtagttgaacatttctctcctcaggtactgcttcatttgttttctgagtcaggaggtgtcactgctctgcaaactcccctctgcagaaaccgtgggaggttctgtctgccacttctcagttctcaaactctgcttcagaaagaggaggaaataaggatgcaggataaactcaccagtctttggcttcctttcattctgtggccagcctaattgtctactcagccaaataccaattacctgcatttggtgttacgatgacttcaatagcagatggacactcaattgattgcaagcagactcttaattatttctcctccttcacccctcttcttcctttgtgtctacatccggcagcctaactctctcttgggttccctaacctcccttgcaacttcaccaaaccaataattactcgtttccctggccttcatgcttcaagtgtttaatgatttggaactcagcaatgaaaccgctgataagcaagggacatctgcaaattggcttggaggaagctatttcggtaacttgaactagataaatagattattcagattctaagtctttatctgaaatggctttctgatcctctatatccataatgattaccttggggtttgaagtatcttggtattagagtgagaagaagagtttaacagctaatctctcttagatatctctgtgaattcatgtgtagactcatatgtgcttatttaaagtgtgtatggagataactggaacacatctgggcttctgggtcattctgaggcacataattgccaagcaggcctgcaggcatcagagctcataagaacatttacatacagacaccctcacatgaagatcagttcttctttgaggataacaagatgctgtactctagatatttgaaaaaaacatacacctctccatcctcacaaaaacaatcttctttgctcagccagtcagacaacagtatcataaaaataggaattgactcacttaggtcagctgatagaaaaactgtcagccgaactgtccctggtcagaaaggcaaaggagagtggtggtcacaggaagaagaatcaaaatgcccagtggagttgtgcagagggcaggctgacagcgacacaccatctaaaatgcccccatgtggggtgtgtagtggctgctgttcttcaatatggactgctaattcccaggaagaattagcttttgatgaaaatcagcattggtctggtatatcatatcatttttgaaagaagaaatatgtgctttagattgggtttcctcagaagactgactctgagatgaggatttgagtgcagggtagtttatctgggaattagtcccaggaagcaatggtagggaagtagggaaataattcagggaaaagaagactgtcaatgcaaggtgagtgaatgagaaagtgagtaccgtgggcaactgggcctcaatcctgctggggaccttctctggagagaaggtaaatgtacctcagagttgataccactgccagcccctgcttcccaccctggatctaggaagctgcagcatttgtccatcagctcttatccatcactggtttgagaggtttgagagagattcttccaggggtagtcctcagcatttctttctttctttctttctttttttttttttttttttttgagaaggagtttcactcctgttgccaaggctggagtgcaatggcgcaattaggctcactgcaacctcctcttcccgggctcaagtgattctcctgcctcagcctcccgagtagctgggattacaggtacccaccaccatgcccagctaattttttgtatttttaatagagatggggtttcaccatgttggccaggctggtcttgaactcctgacctcaggtgatccacctgcctcggcctcccaaagtgctgggattacaggtgtgagccatggtacccagccttcctcagcatttctgtctgtccccacacacaggctcagcagccagagaaagccaagggcatataggcagggcaacaacatctgtgcaccttgcagctgcctgctagtttcctagaaacatattctcagacatgcctaagaagaaatgcacttgtaggtgtttcaaacgcaggggtccctgagttaccaggataaaacccatagagtcccaacagacatctgtaccaaaagaggaaagcacttgattactgaggacactcagacggtggtgggagagagtgaggaaaggaagagcgagggtaaagaagaaaagttgttattagaattaaaggtgatccaaaaagctttaggcaactgtcacgaaaatcataagactctacggaaagaaaaagactgtcggtcatttttcaaccaccatccagtctgtaccaccttgactgaatagcctgaacttggtagggtttaaatagtaaacaaccttattccagataggctcttttgcataggtgtcctttccttgctctggacaaaaatttgtgaagacatcatggatttctagtcacgtttatttataataatcacctaattttaatgattaatattcacaaataagtcacaaatcatagtctattactattatttacaatgaaaactacaaatgtactccaataaaagtccctcttacattctttatatctaaacaatattgcccatttcttcacagaacaatacttatttcctatcaagaaaaccccatattcagtctgcaagttatttttataaacatttttatttgaggtcattagttttgacctttgatttacaaacttggtcctgtttccaaaggatttgacaggcaatcacagcccttatcttgaaatggggctggtagtccctccctctaaaagcttctaagattgcaaagcctaccttattatgcagcatcctgtttaagtccatgtgcaaagaaatcactcaacctgcccaggtacatagtggtacatacatcactaattgttcaaactttgctgattatacattcttccttccagagaattaatactgaagcaattgctcactctgatagagtacttgagcatagtcagaatttttcatgtaaaagaaaacagccagatatcaggacctgtttcatcagtatcgcttctaactgtacattaacaccaagaaatattaaagccacattctttgtgtgaaagcaataagaaggttaaagatggcttttgtaattagctttcgaaattacttgttggcatcacaccttccgtatgaaaatgcaaatatgctctcagaatgggattccggagtgttaagtattcatcctcgctgctgtatgcataggagtttatccacagaactttggaagggtcagccacaattttatttcaactggcagttaggttatgttttattccatggataaacttctatataatataatttaaattaaggagttcaacactaaaggaattctaactctcagtgatttttttaaaacagatgattcaacatcattcatttaattagtttagaggggaaaatttggaaattaatcatcaccctagttcttaagtattcatgatgccttttcaaatagttgtaaaatataccttcacaaactttggaaattttggcattttaaaagatttaggcatggtcatgacaaagttccaaaactgggaggaaggatgttatcctagaatgagtgagagttcacctgggccaatcaataccagcttggcagctgtgtgagcctgatggacaaatcctggatttcttccatctccagtttcttcattaaaaaaaattaaataaataaatacattactctctccccaccaacacacgaactcacaaaacaaaaagtctatattatgagtttactaaaagaattaaataaaataaagtatataaagtgactgccacagtagcaatgctagtttctcctctaccagcaaatcatgggtcaatattataatatatttccactttattctgagtgtcctgcagttgaattgacttaaggttaagcaaagaagaatggcaactttcctggttccgtggatggcaaataagtcatttatgataagagaatacaattgatcctttgtgaaggcaattgatattcctctttcagaaaggggataaaagtggcactccttgtaaatctgacatttttcttgataatctaagagtgggataagaccctcttaacacagatggcaaggagaaatggctttggctttttattctccaaatgcaaaaagtcaatgcagaaacaaaagtttaattcattgtagtagtttctctccctcctcccttctgcttccattctctctctcttcatctctcgtttacctgtccatttccatcttcccctccctccctttctctccctctctctctctctcacatgcacatacactacacaatttccccataagtaataccaataaagccaaagaacagtaattacagacatttctaactcaaagagccatatagttcacattagtggaaacttgtcagtaatgtagaatttcaatgtagttctgcagatatattatgtgttactgtatcataatcatacatttacatgctaaaaccaaaaatgctgttgagcaaataaattttgagtcatataataaagctcattaacactttataaagatacgcattacgaccagctgcctacaagtaaggaatataaccatgcactcataaacacttttgaataagctgtgttgaacaatttatacttttaaaataatacctctatctagtttctcacttcaatctaatgtaaataattggatatcagttgtataaatttatgattgtcataaatctttggaattaactgtatatagagttattcaaatctcatggtctatagaacctgcctatcatcaaggtccttttttttttaaggtttttcaggacaagttgaatcacataagatctctattagctagatgacattgaattgaatatagaacaatatactacttacactttaactttgcactataattctagttttgattttcaatgatatatgtccaatgaggaatttaagataaataaattggactgatagctgcaaaaaatcttattatattaaaacaatttctgaaggtcaattgcaaactagagttttaagtataaaacgaaagtctatattatttttaaattttaagtagtgagatacagtgatggccgtgtgtgtgtttgtgtgtgtgtgtgtttgtgtgtgtgtgtgtgtgtgtgtgtattttaaagaggtgagttactttttctgggagggtcatggggtatgactttgtatttcctcttctctctttttgttaaacattttatttaggtataacatgtatacagaaaagggtacagcttaacgacttttcacaaagggaacacattcctgaaaccacagtgcagtccaaggaggaaaatgctagaagccttcctcaagctgtgcccaagtaaccaactccatcaaaggcaaaacattatcttagcttctcccaccagagattgattggtctgcttgattttggacttaatatgaatagaatcattacatcatacaattctaagtgtgtttgattcaacattttgtatttgtgagattaattcatgtcgtgataggccatgttctttcttattgctgtctagtatatcatagcatgactataccataatttgtaagttcattttactgttgatggacacttgggttgtttctaattcaggacttttaaaaataatgctgcctgaatgttcaagtacgtgtcttttggtgacatgtatgatgcattattattgggtatatacatacctaagagtagcattgctgtgtcaaaggatatgagtatatttggctttagtagagtgttccagtcagctttccaaagtgctcaatttacactcctgccaatagcttaagagttgctccacatccttattcacatttccaattgtcaatcctttcatgattgtcattctggtgggtgtgcagtggcatctcattgtggctttattttgcatttccctagtgagtttgagcttctttcatgtgccttggccatgtagatatcctcttttgtgaaatatctgttcaagtcccttgccgattttcacattaggttctcttcctttttcttactcatttgatggagttctttataaattctggatatgtcgaacaaacgtactgaaatgttttcttccactttatggttttccttttcgtgctcaaagatgtatttgatgaatacttgttagtttagtccaatttacatatcttttccattatatttattaccttctatgtcctattgaaaaagtctttgctcccaccaagttcataaatacattatcctgcttttagatttacgatctatctgaaatcgatctatgtgtattgcaactggagcttgaatggattctaaaaagggaaatgcagtgacctttaataacccttgcttctgaaggagagcatttcttaacacttccaaggaactaaggtaaatttgggagaaactgacccaacagccacattaattaagatgtgaaggttggcaaatatctattgaaggaatcttccagtgaatattatctcattaactactactcaaaacaactgaataaaaaggatactgttgagaagctatttacaaagaaagcacaataccttcgtttcctctgctggtaactctcaaattctaaaaaaaaaaattcaacttttaaattctaaaaaaacttctaagttctataaaaaccaaccctcagcatatacatgtttagaaaagctccatagaccagtgttatctagtagaaatgaaatgtgagtcatacatgttaactttaaatttcctagtagccacattaaaattaaatatcaagtgaaattagttttaataatatattttatttaacgtaagatatccaaaatatttttatttcaacatatggcactagccacacttcaagagttcaatagctccatgtggccagtggctaccatactgggtaacccagccatagacagttacatgaatacaatgacctcctttataaatattacaatttacattatctacagatcaatccattttatattcatatgacagccacatattgaaagaagaacacagtggttctcaaggtgcaacctctggaccatcagcataggtatcactggggattgggagaaatgaaaattcttttggaatcaggctctctagtgggtgggtctagcaatctgtgtttctgtgattctcatgtgtgccccagttttcaaactaggaataacagatccacatttttgttttatacagtgacatttactctatattacaacattgtaaatatactgtcttgtctgaagcagaagcattttggggggttatttaacctcatagtcaggttatcatctcacatcttccaaataggactgcccatggcacgacaaatggtctactactctctgagacagacgtgtgggagaaagtttcttttttctgtttcctgatgattctcaattgccacaggcatctattacatttgcagaagcaaagacttggacccacacagtaataatcagagtaagaaaattgtattatggagaaaagcaaataaccactttcatcttattagctctgtatgtagaaagtgaatatgtaaagaagtacttgaagagtttttatttttttaattttcatttttgtggattagaatatacaatctgggaagatccagttttactagatgaatatctctgcagaggcagggaactttctccaaacttctcattgcagtatccccagcacacagaagagccagacacctagtaagttctcaataaacatttgttgaatgaatgaatggatagatggatgcttgataaacctttctccatgtcttagattctggcttaggaagataaattagctcagttgctggaaatcccttattattttagcacaaaatgacctgaatcatccattttctgtttttcaagcagcattcctccttcccccaaaagacttcttgccatctaaacattcatttagagaaggtgcagattttaagggaagttctcttttgttaaaacgcgaactccataagggtaaagatgtttagttcactgttttatttctataagtcagaacactgcccatcatgtaacagatgctgaataactatttgttgaaacaatagattttatccttatgaaatttcattacagcccttctctctcccctctacacacaaccatggaaactcatcaatttatgtgtttctccatgttgttttacctgccccaaatatctccaaatatgctattccctgtatctacctagctcccaccagtcttctagacccagttaaagactttggccctctcagagaagctccccaacaactcaaggttgtctgaatctttatggttgtgtctaaatctccaagattctactccacttaatccaacacttgttagctagcatgatgtctttcatttactaattttgcatccttgtatttcataatctttctcttaccatatagacttgtggctacttgaaggctagaaccatggaatacatttagtttgctcattaaaaaatcttccccatacctttattagtctgtagaacatattaggcataattatgacttattttaaaaaggaagcttttagacaatacttcttgtccaagaacagtcttagttgactattgttaggctgacataattattaacagctctccttttcactctcaaaccagtcttggtttggacaatacacattttcccaagttatggccaacattgatttagtaaaacattgactaatgttttaatacaataaaatgttgacatgggctaattgacattagcccatgatgttagtactgtttgaccatatgatgaatttgacacatacaatgccttttgctagatactatctttacttatttagatttgtaaaaggaagaaaaaaatcagatagcattacaagtgggagagggcttgattaatcttatcagaatcctcaatataatgcttagaaacctttctgagaataagagggaaaagtggtataacccctcaactatatactctttttctttatttgaacttttaaagccttttcacacatgatttcctttgatgtttacaacactcctcttaagtagttcagggtggtagatactggtatttctttttagacataaggaaaaacaactccatggagttatactctttggccagccagaaagagaggatagtataaatcccagtgctttctattgtaactgtatagctccttttctccccatgaatgcatgatctttaacttctttcccataactaatgatacttatatccatttcccaataaaaaacaaacattaattacaagaatcaaaaagcacttcatctaaggaatgtttgcagacatgccatttggtttgctttctaagtcacagggctaagaatgatcatacctcccattcacttcacactggacactttgttaggatgcctttggctttgtttcataccaaacttaaggaacagacaaagcatggatttcactttgtttcacccggagctcagagaggttaagaagtgaactcaggactgcactgctgtctataagtgatgtagctaagcatgatttaagacacctgattcctacctaggtcaagtacctttgattttgaccagtgagaattccatggaataaaatgccaaatttcccatgaagcttattgtaatgagatataacttgattttaaaacacagagatgtaacaactggaagttaacaaaataaccatttttaaaatttttcctatctttcctgcactataaataagcaagtgaagcactttatagattctgagttatttccatgttttctattttgagtagtgatgtttgaataatgtggagatagaggaaactttgaattaggaacaaatccttaaagaacggtcacaatgccctcctctgcatcccctgtactacaaccagatctctgcttgctgtcttttgtgtcctatcagctgcaataagccaccactatttacaggttgtttgaaatacacagtcctgattgtaatattagaggtctttctagcttaagggctcagtgaatgtttccccttcttcagttactcctttggtttttactgcagattctccttgtctcactttctgccctagagagcagatgccaaataaaataggctgggagcttcttttaggtactttccaattgcttcctttcaaggctgcacttactcatcccccaggtatgagaaacaatctgtatggaaacaccagttcctagtagtagagaaatagccttgggtgtatattttcttcccctcagtctattccttttgaaacttgaaaaaaaaatattaagcttatgagggaaaagagaagggttattttgcttcttgttttttttttttttttttttaattttatttgcagagactaggatgctctggggaagatgtgagatcaacatatacataagtaatgctccacaaagagccactccttcaagcttggtaggaataaaaaaaactctacatctctgtgatagataaggaacttgtatttcacaagtgggaacctggaggacttggaaaaaaaagtgaaatatcgtgtcacatggggaatcagagtgccttcctctctacatgcatgcatttgtgatggagatgtctcagttggtgaagggttggaagggtggaccttcaagcacccggtcccctcatgcctatggcaaatggggatacttaagaacctccttcaaattactaagcagttacccctgagctgcaaaaggagacagttaactcagcatatcaaactagttttttgagttctaacaccaaagattaattttgccagtttttgaactccttataaatagaatcacacatacatacatttttggggagtccagcctcttttgctcaacatgtctgtgattcatccatgttgttgtgtgtatcaacagcatgttctgccaggcacagcggctcacacctgtaatcctagcactttgggaggctgaggtgggaggacagcttgagcccaggagtttgagaccagcctggacaacatagtgagaactagtctctacaaaaataaaagaattagctggacgtgatggaaagcacctgtggtcccagatactagggagtcagagatgaggggattgcttgagcctggaaggttgaggctgcagtgagctgtgactgtgccactgcactccagcctgggtgacagagtgagactctatctcaaaacaaaagtgtgttcttattattgcacagcattccactgaatgaataaaccaagatttctcattcttctgttgttgaacttctggcttgtttccagttttgtgttactttgaatagatccatcatgcactagttttccttgggtatacacttaggggggctattgctggatcatagtataggcttatatgtagctttagatgataaagtatccactaggctgttataccagggagaagaaaatcccaagcaataaaagaagcaatcaaaagcaaaaataccttaagacagaaaagtcattttccttgacacaaaataatccaattgccagtgcagataggatttgcattttgaaactcatccatctcaagctacatgctgcatatttgaacttgtctgcaggctagattcagcacatagggcgccccaaacatgttttgttcccccagaaaatcaggtcacttgttgtttgcatatttttgttttttaataaagcaatgtttaaaaattaggaggttttatattagaaaactctagctttcaagcttcctttaaaaaactggaatatctggcccacattcccatagagcaatgatagattggagataggtaggagccattgcatttacacaggcctacgtttccctctttaaaaagttctcaccccctgcctactttgccttacaccgtgtggtctccacaggcatgagaaccctgctccgccctttgacgagtcaagcaaagtcattcacatttctctctatatatatagagatagcagttccaaaaatgaaagtgttctgaactgttaaaagtttgtctttgtgcatgtcaaactttgaaacgtgtgaaaatattcctgaaatgtaccacttactatcatgtttctaaaaaatgactaaataagagggacagctcagtacatgttgaatgtgagcgttccataaataaggaatgtgtggagaggggaccagctgagcttgcctctgactagagaaacgtcactcaggatctatgcccacaggcccagtcttctgatcaatacctgttaaccatgtgaaaaagatactgcacaagagataagaatacccctctgattcattcaattaaagacttcctggaccaaactcaatgccattataattggtgcactgggcagttgctaattgctctaagtcattttcaggcaagtagagagacaaagttatttcatttttggtagtatgcagtctaggtaatttaaaggatccctatgctaaaatgcaaatatatcctggatacatttataaaaaggtcaattttgatggcctggtatggtagctcatgtctgtaatcccaacactttgggaggctgaggcaggaggatcacttaagctcaggagttccagagcagccagggcaacatagcaagacctcgtctgtactaaaaatataaaaaattagtcaggtgtggtggcctgcacctgtagtcccagctacttgggaggttgagataggaggactgcttgagcccaggagcttgaagctgctgtaagccatgactgtatcactgcactccagcctgcacaacagagagaccctgtctcaaaaaaaatttaaaaagaagtaataagttttgctaggctcagtagttagtaaatgaaatatccgagcttccctccacctttgccctcaaaaataaatgacagagaaatgacaccagagaaatgatttaggaattaaactaatgaaaatgactgggtagctctaaaggaatatgatgataacaacactgctctaaagacaaagcctaggccctgggcaatgggaggcagagcagccaagcctgagagtcagtccctagcgtggaatcccagaagacagccaatgtttctgactcctagagaacacaaagcaatactctccatgggaaaacatccccagtagaggccctaaggattcctgcatgcttgcatcaatactcaaatattacccatgacctgaggagctttggtcacccagagccccagatgaccaaataacaatcaactggtttactgtaccgattgtacatcatgtattagaattagcaggtagatatgcaatcacgatgtgtaaaatgtacaaaaaattaaaaacggaataaacatgaaacatgaacatgagctgactgccatggttcctttgccatctctgaactgacttagatgtggaaacctataaagggcccgtgatattccatggtttataacccttcagttgttctcccctgttatccaaactgcagatctattagctgcccagttattttgtcccaaagatttccaggatctcttagccactgttagatccctgtggctcaaggcaccctgactgccactttaattttgctatgcattatagtagttaaggccacctgacctctaacactaagcactgctacttagcctctgttgttctgggcctcatgatcccagcaatattaggaagattaactcctggacagcttcttcaaatgtcaatcccagcccatagatggcagcctttacagaccaccttctcaaaggtgtcagcactccttttcaggatcccttattgtctttgtgaagggagtgtcctctgggccttcttagttagaaatagtcaagtgatagattgtacctaaaacctttttaacatgcattctaacatccctcctctctgagccgtcagaccctttattgagactgtcaaagaacttgtggcatttcctcatttgctgtaggccatcagaacatacaggatttgaagaaccaccccagaaaactatcgggatcagctccaagtgtccttgacaaacaactgaatcttgacttatgagtgagtgtctctatatcaatgaataccctctgatctagcattatgttgtatggtgaatgtacctgataacaactacttaagcatatgctaagaatgaccctgtatggtgcacctgaatgcagttgggaattccgagctagggaatccaggagtggccaacccagagagctattccttttctatgaggaacatctgggccccatcctgtcatgtggaatgtgggctgtgcaggggattgaggccctgtgttttgggttaaaaggttgccaggtggaagttattgggggagggtgctaagtgaaaatgctacataaactgtatgctttttgcaagtgttgtggttctccggtctagctcaccaccactggactctctcccctgtatgtaagaccttcatgagacccaatgtcttgtttctggctctgggtctcttcttctgcctcttgaacttggtgccatccccagtgaagtcaataagagttcagcacaacatatatccccccctccactctaatacaaggtccactcccgggtgggtttcaaggtacttcaattgttcagtggataggctatttccccctggagagggctgatacttctctgctgagtctacaccctagttatcagcatggaggcaatgagcagtggcagagaaagatcttaagacatgcaagaattatctcataaggcacctgcttcaggtgagattcctacataactgttgggcaaggaaagctgttcttctctgtcagaaaaagaaggatgacgcctgtcttccagggtggtttaagggaacttagaagtttaaggtcctcaagctcatccatccaaatgaactcatcccacgtctccttattccgaacatggccctgagtttgaaacagaagattttacaaagctgtgtatcctgtctccttggcagccctaccagccttatagtcagatcctgggcctgtgttacaacacagtctgccctgcagtgaccagagattagtctcctttaaagtagccatagatgatgtcctctggctttcagagcatgccttaagttggcaatgaaccatcctcagcttaacattttctttccgcaggtcaaaagtagccatctacttcacaatctgcataattatcagtgctctaatagccactttgtgttgcagctagtaggcctcctaacacctgaccttccacttaagccatttcccaatttactgcagatgagagcttaagtaattgtaatgctgctgcctgcctgccagggtttatttttatcccaatttaccactaaatatatgatccctattgctttcagacaggtcagtaatcaaattccaaaatcctatctgtagggtatcttgtctgcaactacttgttttagttcagtttccctaggacactgaacctgagacatgcactaagcgctgaggttttaattggaatatgaaatccaaaggtgtgaaagagaagagataggaaatgaagcagggaagggtgagcagcaagacaaagtgagacgttactgctgtgaccactgcattaccatgaagaaatacagccagtggtccagcaaagcatctgctatgtgacacgcaacacctctaaacatgctggacagagacatgctgtataggccttgagagagagagatcgtcagagagagaaatggaaatggaatttacctgccctgctaccttctctttcccacaggagcaagacgctctcaaccaggtacaatcttgttccctggggaaacatttggcaagaggtagttttatgtctagaggcattttttattttcattacttgggggtgctattggcacctagtgggtaaaggccaagcgtgctgctaaatgtgctgcaaggcacaggacagtatcccatgggaattatgcagtccaaaatgccatcactgctgctgttgagagaccctaacctaagtactggaaaaatcaagaaaatctgaagagataaatgagatgtgtctaattaaaaaaaaaatggaaaaaagatgaaagatatggaaggcatttcacagaacagaacacacaaagggaaaactaaacatgaaaagatgccaaacctcattagtaaccagggaaaatcaaattacagcaagattccatttcacactcaattgattggcaaaaattaagatatcaagaacaccaggcatgaggagaatggtgttcaaagggaatagtcatataccacttgttgggagtgtaaattgctaccaattctgtgggaaagaggttaatatgtattatgttgtaaaatcgatcatatgtgtattcagggtgaccacttataccattttgatcgagactgtcctggttttagcaccaaaaatcttgcatcctggaaaactcctcagttctaggcaaaccgagatggttggttacctatacatcttatatcctaggaatccacttctacatatacttccttgaaacactcttgcacaggcaccaggagagatataaaaaatgatcatactaccatttttcataatagcagataatggaaacaacagaaatatcaatctataaaagaacagatagattgtgatatattaacacagtgtagtattacttagctgtgaaaatgaactacaaaagtttccattctgcctctgaggagcttgagatgctaatattagcctgttaaacttcacagtaaaatctgctgcacctggtgatttgggcgagctccacacttgcaacacagacccaggagtacaatgaaagtggctagggaaaactgtagaatagagctgctattcaattgacacaactcagtctcagagtggagaaatccatgaattgaaaattaccatctcacatacatactgcagtggaaacacacacatgcacaaatctctatataaatatatctctaacatcagcagtcttcacagagacttggccttgtgagaatctagagcctcggaatttgcttgtgaccataagtcaaactcttcattcgttttcacaaaaacctactcactatgcttagcacgcttataaaagttgtcccatagaaagagtttctatcctgcaatctgcatcatcacaatagctccctgaagccacaaacacagtcacatgctgaaaagttatttccttcaggtctgctttcaaccacattgttttcttcaatcacttacaaaggtatttcctccttcctttcttgttgaaataaatacacattctacaaactctttttttttttttttttctttttaagacagggtgtgttgctctgtttcacaggctagagtgcagcagtgcaatcctggctcactgaaacctctgcctcccaggctcaagtgatcctcccacctcagcctccccagtagctggaaccacaggtgcatgccaccattcctggctaatttttgttttttcttttttttttttgctgttgttgtttgttttgtagagatggggtttcgccatgttgcccaggctgatctcgaactcttgagctcaagcaatccacctgcttcagcctcctaaagtgctgggattacaggtgtcagtcaccaagcccaacctacaaatttttttctaagagataatcttaacaattttggtaaccctattaccacacctgactgtccaatcaaccatacattcatccattgacctaactttgttcatcttcccatttgtctgtcactttttcataaacatattattctgtctgcaaattaacttttattttcttgaattctggtacattttacatatttcttgtctttaatcctcctctctctccctcaccattcccaagtaacctgacagcattatgaaacactatattcctatgtctttaaatacatactatcctgctgtcttttcttttctgttcttttctttcttttttcttttcttttgagatagggtcttgctctgttgtctagcctggagtgcagtggtatgatcacagcctatttcccaggctcaagtgatcctcccacctcagcctccaaagcagctgggatcacaggcagtgccaccatgctcagttaatttattttttgtagagatagcatctatttgcccaggctggtctcaaactcctggacccaagtgatccttctacctcagcctcttaaagtgctgggattataggcatggcccccagccccttcttgttttaaattctcttccaatcttatttggctagggaatacctacttactctgtaatcttttattcagatgttttcttcccggtagattgtttgcaatctagttcttctttttcctttatcaatgtcttttgcaatgtgactttgaactcctctaaccaggaggtacagtctatttccacatcccttaaatctgagatattctgtgaatttctttgatgtatatgttgtagaagtgattgttctgaggccaggtcttaagcagccgtgcatccttacacttattctcttgaataagtgatccacatggctcagttgccataaataagtcttggctagcctgctggagaagtgagttgccctagccacatccagtcaagcaccagacatgggagtgaagcatctgagactattcagccccagccaacctgtcagcagactacagagcaaacctagctaagatcagccaagcttagtccaaatcagtagaagtccccaactcacccacaggctcctgatcaataacacatgcttattatattaagtcactgagttatggggctatttgttatacagcaacaagtgatactctttttactgatcctgttcaatagctacaacatacttctagtttagcccttacaatactacagtcttttggtctttctcttccataaacatagaactccttgggaacaggagcaatttttgttttgtatctcagaatctaaatagtgcctgctgactttttaatagatgagtgtcagaaaaatgtcaatgattaattagttaattaaggattacactgttgcctaagccaagggacccttttggaggcagacaaactcgggtttgaatctcaactgtatttcctatgttacttcagataatttggttaaccttgatgagtcttgtgtggtcatctctaaattaaagaccggaataacatacattctgcaagattgtggtgattatatatatataatcatgtataaatatctcccacctgacagaggggatatccaacatataagaattaaatcataaaatgcatgtaaagcatttaatataggacttggcttctagttgctcaataaatgatagctctattcatatgatcatgatcatcaccatcatctttgttgtcacttcttgtagcagaaactgtaggtgctctatcctcatctcattggcagttatcatcattgtgcaagttgacctgatggtggctttcaaaagcaaacatctgggactctgcctgaggacttcctctggctgctggagttttcttggtctacatgtatggcacgttacaaataccagggagtcgacactccacacctccacctaagggagcagcccttagtcgagacatatgggagaagatagctaaataccctaatttccatgcccttgattgggataaatccaagttatgttctatgctgtatcccaaagttacctaatgtgattgtacccctcttgatcacagaaacaataaggcaccttttctgtcttccttccttcctctgctcacatccacactaccctacaaacgtatgctggcatcacctctgaataaacaccactccattttttttgtttcactctgcttctggggaaatcaacctaaggcaccattactctttctagttcatgttagtcttgttgcttcagaatcccatcatttcttaaggaactttgacttccatttgaaaggcctagccttttaatgatctctccagctaatcaaagagttttatctagtccagtggatgacaagactaatcacagaatggcgtatgtcatttttaggtcttctttgttttcatcctgactcatttctctaagtatatgaggaaagggttaacttgtgcactggtagctctttgcttatgttgatgggcacctggaaacatggtattgattttggccatgtcagaggtgaaatgtactagctagtgatttataaggtgctgtgaaaagtctaaaaccccaccagcatcctgtaccagcttgtccatgctgtttatcaaaattgtactgattgatggtttgcacctgtttacttcttaacaaagcttgcttttagctacctgagctgtgtggtacaaaatacccctcagtaagcttgagccttggccctcctgtgaacttgtagagtctcatgtgactttttaattatccagcactgtataattgctgcactgggtctgttttctaacgacaaaaagctttacagaaggatctggggtggaggaaggaagaattcctacaccatacaagtttagaacaatttcagacagttatgaatattggaaagcaagctgcactttgctgagatcttaaaatatcgttcagttgagctatcatgaaaaactcttctgagcacagacttgagggttgtccaccctccaacagtagctgttggcttcttgcaaatttggacctacaaggtcattgcatacatttcttttcctctcttccctaccctatggacattgcacaatggttacataatacaagatgtgaaaccctcactgcacagaggataagtttctctggtaaccattgcttgaatccatatattctcatctttttaaagcaccaatttgaaattggattttaattttcccttcaacattccatctatgaataacccagtataaaagttttagtgttgaagttatgcttgactaagtcactagtccttaaaaaactcttgtttctcatctagaaggacacccttcccacaggctgcctctcagtggcttgagcaacaatgttcttagaagtcaggagccatccaggaagcaggagaagagctacaaacacatctggaatgctcaagtctccgagtgttacaagataacccacctagaatatgagattttgggcagaattttctttattttcacaatttgacatcaacaccctctaagtttcagaagcaggccacagacatattacatcataagcagttctttgaaatagtagaataaattacaatctgaccattgtgtattaaaacgcaaatagacagcataccctgcatatggaaattagaattatatttggagcttcataaggagcttgggtggtcatctatgccaaaatatctttcaaattcatccatctccaatgccacatccctaagccaagtcagcagtatcttttatgtgggtaagagcaccctgcgtggggggtagtacccatgtgtggggggtagtagcgacccccacacatactaattggctataataaagaagaatggcctttaaaaaatataaattctttcattcacctgctaatgactttccaataacttccatctttattaaaataaaatgaagacactttcccacatctaaacagctctccagcttcatcttctacatcctgcttctccaaagcccctctcttaaagtgatactggcctggtttccaaaccttgaatatatccacatggatcctggttcatgacacatggacggtatgatcttcaaaccctacttggctggatttttttctatcactcagttctcagctcaaactctctaagtgttctgctctgacactcaaactaaagtagtccctcatcccttatctcgttaacctgcttatcgtgttcataaacattatcaatggttgtcagtttccttttcatttatttacttacactttccactagaatgtcagcttctgtaaggccataagcttgcccttttagtttccagtgcctacaacagtttgcaggcctatagcagtcacccagagaatattgttgaatcaatacatgcatgtttctgtgtttttagtattgtttaatttaaaatacattttaaaaggacaaaaccataaggtaatttattcccctacctttatatgatggctgtggatgaattaaagactccagaggagtgtggctatttctattctgcaacttttcgctggtgcttgtcagtcttcttcatttttcctcagtgttcattttagcaagaggtggaagcatttcaccacagtgtatttctgtaacaatatagtaccaaaatgactcagaaccccactaacattatgctgtgcttaaaaataaacatatagccacatttactttacattctcccacatgcagtgcattcttttttactgtttctatcattttctcaggcatgcagctacggatctgtatattattaccaggacacctcaggtaggattagactcctcttagtaccttggctgcttctgtaccacagcattttctccactgtgaataattattctattacaaatccatctctccaatagatggtgaaccttgtggggccaggaactgtgcctttggttcctgaatctctgggacctagcccactacctggtaatcgtacattttcaatacagtcaattcttgatatttgcagtagttatgatttatgaagtcaccacaaacactaaattagcaaataccaaagcactgttactaggagaaatagagggttaggtttccacaactctgtggctccaatatttttgtcaaataatcaatacataactttgttttatgtgtgtcactgtttatacatattgttgatttattaagatggaactcacaatcaacagcactgtagcttatgcctccacaaagattttctaacacacgtgttttctccataaggcacgtgacagcctattgtgcttaggaacatgagacagcatgtcagccctacactatggggccatttcaaaccatggaaacaccaacattaagcacaaaaatgtaaaagatatgagaaggtgaatctgtaaatataaaatcacaaataatgagaatcaactatatacatattggctgaatcacagttatatgcggattatacaaattcccaaccttgtttatagttcagcatatccttgccatttaaatgattaaataataaatattatagatagggtagaaaaggactacatacagattttatattcttcatgaaagacccaggaaatgaaagcaaatattatttcttatattctctgctgtcctattaaaaagacaaattccagcaatcttatcaaaatattaataacattctttgcagaaatagaaaaaggaatcctaaaattcatgcagaaacacaaaagactccgaataactaaagcaatgctgagcagaaagaataaaactggaggcattaaagtacttgatttcagtttatactacaaagctatagtaaccaaaccaacatgttactagcatgaaaacaggcatgccgatgaatagaacagaataaaggtcactgaaataaatccacgcacttacaggcaactaattttgccaaaggctccaagaacatacattgaggaaaggacagtctgtttaataaatgatgctaggaaaacctgatatacatatacagaagaatgaaattaaacccttctctctcactatatgcaaaaatcaacttaaaattgattaaagacttaaatgtaaaacctaaactatgaaactactagaagaaaacattgagaaaacattacaagacattggtctaggcaaagatttttggggtaagacctcaaaagaataggcaaaaaaaccaaaagtagacaaatgggattacatcaagctaaaaaacttctgaacagcaaaggaaacaatcgacaaagttaagagacaatctacagtatgagagaaaatatttgcaaaccatccatctgacaagaggttaataaccaggatatattagaaactcaaacaactcaatagcaaataataatccaattaaaaatggacaaaagacccaaatagacatttctcaaaagaagacatacaaatgtccaacaggtgtttgaaaaaatgctcaacatcactaatcatcagggaaatgcaaatcaaaaccacaatgagatattatcacactccagttagaatggctattatcaaaaagaaaaaaaaataacaaatgctggcaaggatgcagagagagggaaatacttgtatgctgttggtgggaatgtaaagtaatacagcaattacggaaaacagcatggaggtttctcagaaaactaaaaatagaactaccatacaatccagcaatcccactgctgagtatatatcaacagaaaggaaatcaatgtattgaatagatatctccacatccatgtttatttcagtgctattcataatggccaagatatggaatcaacttaagtttccatcactgaaagaatagataaagaaaatgtggtatatgtatacaatcaaatactattcagtcacaaaaagaaattaatttctgtcactggcagcaatacggatggaattgaaggttattatgttaagtgaaacaagccaggcaaagaaaatgttctcactcacacatgggagctaaaaaaatgtagacctcacggaggtagatggtagaataatggtttccagagactggaaaggaaagtggggagcaagagaaatgaagagaagttgattaatgagtacaaaaatatagttagatagaaggaataagttctaatatttgggagtgccataggaaaattacacttaaccgtaatttactgtatatttcaaaataactagaagagaagaattgtaatgttcccaacacaaagaaaaggtaaatgtttgaggtgatggatatctcaattaccttgactttattttcacattgtatacatgtatcaaaacatcacatgtatccccaaaataggtacaattatgacatatctataaaaaatgaaatcccagagcccgggtattttcttctgcatgatattaattattgctcctccaattttcagagaagttcaaagaaaatttccctgaaaataattgtaggttaatagttcgccttgtctattataggtcaacctaaattcctagaaaatttttccatttttctccttggatgagataagaaataacagcttttatttcattatatgcaccagttatctgcaggtacaaaaggtccatacttagttccttgtattttctgtaaaaatgcaactactctgtgagaggtacaatggagagatcacactttacatggctattttccagtgcatttgaaaaatgtttaagacccccttagaatatgaatttatgttttaaaggtgttgtgaagattttccaattaagtttacctctcaatattttaaaatggttacccttaacattgatttacttgtacttcataggaagtaatttgttgctaaaattatcttctactacaaggctatagtaaccaaaacagcatggtactggtaccaaaacagatatagaccaatggaacagaacagaaccctcagaaataataccacacaactacaaccatctgatctttgacaaaccttacaaaaacaagaaatggggaaaggagtccctatttaataaatggtgctgggaaaactggctaggcatatgtagaaagctggaactagatcccttccttacaccttatacaaaaattaattcaagatggattaaggacttaaatgttagacctaaaaccataaaaaccctagaagaaaacctaggcaataccattcaggacataggcatgggcaaggacttcatgtctaaaacaccaaaagcaatggcaacaaaagccaaaattgacaaatggggtctaattaaactaaagatcttctgcacagcaaaagaaactaccatcagagtgaacaggcaacctacagaatcggagaaaaattttgcaatctactcatttgacaaagggctaatatccacaatctacaaagaactcaaacaaatttacaagaaaaaaacaaacaaccccatcaacaagtgggcaaaggatatgaacagacacttctcaaaagaagacatttatgcagccaacagacacatgaaaaaatgctcatcatcactggccatcagagaaatgcaaatcgaaaccacaatgagataccttctcacaccagttagaatggcgatcattaaaaagtcaggaaacaacaggtgctggagaggatgtggagaaataggaacacttttacactgttggtgggactgtaaactagtgcaaccattgtggaagtcagtgtggtgattcctcagggatctagaactagaaataccatttgactcagccatcccattactgggtatatacccaaaggattataaatcatgctgctataaagacacatgcacacgtatgtttattgcggcactattcacaatagcaaagacttggaaccaactcaaatgtccaacaatgatagacagaattaagaaaatgtggcacatatacaccatggaatactatgcagccataaaaaaggatgagttcatgtcctttgtagggacatggatgaagctggaaaccatcattctcagcaaactatcacaaggagaaaaaaccaaacaccatatgttctcactcataggtgggaattgaacaatgagaacacttggacataggaaggggaacatcatacaccggggcctgttgaggggttgggggaggggggagggatagcattaggagatatacctaatgtaaatgatgagttaatggatgcagtacaccaacatggcacatgtatgcatatgtaacaaacctgcacattgtgcagatgtaccctagaacttaaagtgtaataaaaaatatgtacataaaaatcaaaatcaaagaaagaacatgcagtagctgaaaaaaaatatcttctcaaaagcataccctaaaacttagagtataataaaaaaaaaaaaattaaaaaaaaaaaaagcatgctctatgttttaaactattattgctaggatcactaggacttagtaaaaagcaatgccttacacaggcaacaataaattctagaaggacagttctgacagctgcttttcaattagttcaaaataggctaaaatataagtagatgtaatttcttttctgcatcttttgataccctattcaaacagttcagagtatcagcagacaagtcacctgtcatggaatacagttttaaaattgatataatcatgtgggtctactgcataataataagataattcaatatatttgacagaagtaatactttgatccagaaaaataaaactaaatgcattttgtaaatttctgtattttgttagcatcattatattacattttctatataattaaccattttgagtttattttctaaggattcgtactacttttaattttctatttatgctgcaaatagccaaattaatcaagtaaatattagatatcataaaattactttaagacattctcaaatcatcactaaaactctcctctcatatttctttctcttaaaatatgccattaagaagactttacccatatatctctgctaaagccatattaccattactgacttttaaaaagcaatctgggggccaggtgtggtggcttaccctgtaatcctagcattttggaaggcagaggcaagctgatcacttgagctcatgagttttgagaccagcctgagcaacatggcgaaaccccgtctccacagaaaaatacaaaaatgagctgggtgtggtggtgcaggcctgtagccccagctacttggaaggctggggtatggggatggcttgaacctgggaggtagaggttgcagtgagctgagatcatgccaccgtattccagcctgggtgacggagccagaacttatctcaaaaaaaaaaaaaagaaagaaatctgaatgctgaatgtttagtagactatgttcagataacagctataccattctgaacatgttgataatgcatattttaacaaaaggtacagatgtcaattaaatttagaatttgcatttccaaccttcaagaggaaggagttggcttcgtatccacagactggctccaccttttactagctgcacgatttgaggcaatttattattccctgagattatttactcatctgaaagatggagatgaataccattttctataaaatggcctatgcagagtacctggccaataatgaatagtaaaaaaattagcgtgcattttttaccaagtacaaaaccattccaagcagcattttagtcaccgaatttagctcttcaagccaaaaatcagtgacctgatatctgcgaataatttgataaagaaacaaacaagcaaacaaacaatcctaaatgtcctagctaagcataactaagttttcacataagtttatgccatttcgttttgttttcttgttttgttttgtttttgagaccaaggaccaagtctcattctgttgcccaggctggagtgcagtggcaccatcttggctcattgcaacctctgcctcccaggttcaagtgattctcctacctcagcctcccgagtggctgggattacaggtgcccgccaccatgactggctaatttttgtatttttagtagagacagggttccgccatgttggcgaggctggtctcaaactcctgacctcaggtgatacacccgcctcggcctcccaaagtgctggcattacaggtgtgagccacagcgctcggccgccattttgtacttcatttaaatagattctctggacattttactcctatattggggatgttggaaatcagatgctcattcatgatatgcattcaaaacatataacaactgcattacaaatggcacctgactctgagatatgagtatactattaggcacattggtaagtgaccaatatcaataatatattcatatctcagagttaatgagccttcttctgttttatataccatagaattttagagtttaaaaactctaaaatttaaactttaaacattttaaactctaaaattctatggtatataaaacggaaggaagatttactatcagctctactagtataaacagtctctgcatgcttttttcccctcctcacactcaaggatggcagccccttatgcaaatacatttcaaggtaacttagagactggaagggttccatcagatctgcaatttagaacggctgttgtattactcaccctttcatccacttttccttgtacccagagatgcaattttgtgagtagcaggtttgatacatggtctgtgccattatgttaggaaaatagcattttgtcctccctttatggagaatgggctcaagaccttgtcctcattaatattgagttctagccaaataaactccaatgggttgcaaaatcatgaaagatgctagatcccattagattaaaaccttccaacaactctgagacattagattaagaggagaaaaataataaactgaattgagaaaactcaacatacaacatattttttaacctattgtctttactaggatagaacctttccaaaaaaaattaatatggatcatctttcttagaaatatgtcttcatcactctgccaatttttctttgtgtatactttataacacggataattttaacactttcagttagatgctgcattcctcatccagtaggtgaactccaagtacacaaaatcattccattaccgggtttgacagtgtaaaagccaggcagaaaacaagctggcagagacagtttaatataaacctcctctgaggatttgaaaacaacatcacatttgtttcctgctcctcatctgcccccctgtgatctttgtctctatacatgataaaatatttatagccagagctcagcattttttctttcccttcactgttggaataaggtatgttctgtgtccagaggagaaagcaacataatagaaactctaaaaattgaataagtaacttttggtgcatagaaaacctaacccactcacaaatggattttctttcattcaaaacaagaaaactatgacatacgggactgcattttggcagaaattatttatgcatttgtccagtgaaggaaatcctctctagagaaaattctcagagcatacagaacaatattctgtttggggatttctccaaatacagattgagcactattttatttttcttttcaggtaataataaaactcagtttttgaaaacatcttcaccttttcctacaggaaaatatctggtttgagtttctggcctttttgagacatttcctttgagacaatagaagaattgagtttctaggactgtgaactatactattatcacattactgcttttttttccccatttagagagcaatttataatgtgttggcttttatttttggagtaactcttctttacactgaaaagccaagtgaacaattatgtttagatatattgattttctgctccaatagaaaaagcacttacagcttgtattaactagatgacccaggttctagcccattgtgtttgccttgtaaacttaattgactacattgttctgcctctgggcttcctcatcctaaaaccaaggtaataacagggtgtacttcctctataacacctacttacacaattttcagaggattaaatacaatgatgtatgtgtgagaactttagatactgtaaggtactacacaacattaggtttagaaaagctattttaattcctgtgtttaagttatatggaaattaacttaaatttaatctgacacctaaaatggtaaaagataacagtttacaactccattgtaatgtctttggagtgtgtgaattcactaaccttcacttcaatgaatctgcacctgtccaagctgattctgctgagtttagatttcctaagacaaaagatgagatgggagaagagtggtgagagagttagacagagataaatgtgctactaggaagtgagtttttcaccatcactctccttctttaaaacagggattcttaactgggggtcgtaactgtccctgagctcaattagatagacttcaagggttccatgaatctggatagaaaaaaagttatttttatttttattagtctttaacagtcaataaatcccaataatactggaaggagctatgaccaaaaaaacacaaaccctttcatattacaagtgttgcagatgcctggaaatatcatgtatactttgaatgcacagcagttagtagacttgctgttagatcttcttatactgcaaaatcaagaaatatatatcaccataacacacatttattttatttaatgttttgatagctctgtatcaacattattgccttttaaaaataatcctaggtattttattttacacattaaaaaattatgttgccactgtgataatagcaattccactcccaggtatataccccaaaaaactgaaaacaggcactgaacagaaatgtagtataggaatgttcataatgatactattcataatagccaaaaggtgttgtaacagccaaatgaccatcaagaggtgattggataaataacatgcagtatatccaatcagtcggatgttattcaacagaaaaaagaataaagtactcatacatgctagtgtggatgaacctcaaaaacatgtcaggggaaagaaggcaggcacaaaaagtcaaatattttataagtgtacttatatgaactatccagaataggtagatccacagagacagacagcagatttgtggttaccagagacttgggaacaggaaaatgaggagtaactgcttaatgggtacagggttttattttggagcaatggaaatgttttggaattagatagaggtggtagttgcacaactttttgaatgtactaaatgtcactaagttgttcattttaaacgagttaattgtttcataaattttatctcgataaatatgcaaaataaaacattttgtaaaaattggtacctggtcttctggagactgccaaagacgtctctctgtggcacagcgaaggattaaaccctggatataaagggtttcccaccattatatgggctcctcttcccgtggctcaatcgaaggactcgggcttggcatcacttaacagtgatccagatattcctagcatgctggagtgctccctgaaggctccacagctatataggagcaagaatgttggccaggtgtggtggctcacgcctgtaatttcagcactttggtaggccgaggtgggcggatcagctgaggtcaggagtttgagaccagcctggccaacatggtgaaaccccgtctctactaaaaatacaaaaataacttagcccaagtatggtggctcgcacctgtaatctcagctactcgggaggctgaggcaggaaaatcgcttgaacccgggaggaggaggttgcagtgagttaagaacgcaccactgcactcctagcctgggtgacagagcgagactccatctcaaaaaaaaaaaaaaaaaaaaaaaaaaaaagaatgtagccagtgagcacaaagcttgctatcaaagccattcatagtttttgtgtgtgtgtgtgtgtttaatgtacttctaatattaactgggaaatatagttcagaaaatagagcatgactaaaagctttccaggtaaaggtaatatttagctatcacaaaaactatacatttaaaatgtccagaagcaatagactttaatatttcagtggtaggattttcctgtgctgtcacttctcccatatatcatgttttggaaatattttcattctagctgtaatgcttctagaactttattcctttaggctattttttaaaattcaaatatactttataatatccactattaacatgtaccatgaagaaagaaaaagagctggtctagaatgagagtgacagaaaattactagagaaagaggttaagaagttcattcgaagggaaacttgaatgaactgagtgagtgagtgagtgttatagacaacagcagggtcaacagtcatccaggccagggagttagcatgtacaaaatgtcatccaggccagggagttagcatgtacaaatgtcctgaggttatcaatgtttataaataacagtgaagacttgtttggctgaagcagagtcagtgagaaaagagtggtataaaaacaaggcaaggccgggcgtcgtggctgacgcctgtaatcacgtgtgattacacctcgtgtaatcacgaggtcaggagatcgagaccatcctggctaacatggtgaaaccccgtctctactaaaactacaaaaaattagctgggcatggtggcgggcgcctgtagtcccagctactcgggaggctgaggcaggagaatggcatgaacccgggaggcggagcttgcagtgagccgcgatcgcgccactgcactccagcctggggggacagagcgagactccgtctcaaataaataaataaataaattaatttttaaaaaggcaaggtaagtagccagtgaccagaccacgcatggcttttcaggctacagtaaatattttggattttattgtaagtcccaatagaatccaatggaagattttttttttttttagaaggcttgctctatcgcccaggctggagtgcagcggcgccatctcgactcattgcaacctccacctcccaggcccaactgattctcttgccacagcttcccgagtagctgggactacaggcgtgtgccaccatgcccagctaatttttgtatgtttagtggagacagggtttcccagccaggctggtcttgaacccctgacctcaagtgatcctccccccctcattctcccaaagtgctgggattacaggtgtgagccaccgtgcctggtgtctgttggaagattttattggtcttacaataaagtccaataaaacgaggaagccattgacgagcgtggagcagcgggtgcatgatctaacttacattttaaaagtttccttggaattggtggaaacactgcaggagggaaaaactgaaagtgggaatattagttaagaggctatcaagtttgcacaggtgaagaatggcagcgggtttgcacaagggtaggagcagtagtgggaacagtgagacgtggttcaattctagatgtattttgaaactttagttgacttattgatggctttgaggtgcaagggaaagtattttggcctgagcatcaagatggataggagttctatttactgaactggagagaatcagatttaaatgtgttggttagaaaaaccaagggttcagttccagatgccatgatagattacaaaaataaaatacggcctcaattcttcatctttcactgtataagtgctttttaccaggtaacattgtaggtcactccctctctggctctaggtttagccatgtgatttgatttgctccatgggacattactgacatctccacattttcaaatacttgtgcatttcgaactgttcttgcatctctgccatcatgatgaaatctgtccagctggcaggtgcagaatgagacacataagaagagaagccatgtggccctggtcaccctgggcaaaggcagcctagattagggaacggtcacctgagaagtatgtgcaaatccagccaaatcacccgagctatctagtccacccactgcagttgcctgacgatgcatgagcaagcccagtctagatcagctgaacctcacaagtttgtgagctaaataaatgtataaataaatttgtggctgcttattatgtagcattttcatggcaatagagacctgactcaggatgtttccttttcacccaaatatgagtaatgcaatagcacctcatgtcagccaatcttagtctgtgggcaacagaacactgcccgtccattctagattgcttgcgcattacaaatgtagcagaaaatttgtaacagaaactgaagcataaatgaatgactaaaccacaaaatcgaggttatttacttccacaagcacattccaaaaaaggcccagcttggctgatccaaaaaaattttttttaatttgtagtttacggagatttatttatgtttttagtaccaaagtatgatatttttaagagttattgtcaaatttgagaaacttctctcaagtgtaagttttcaaggcactcgttttctttgaattgccaaccttcagctacttatttgtcatcagtgtcctcattgacttggttttcgatattctcttgcacattaaggaacagaggtgtatgttgcatgaagccaatgaagccaaaagctcaaggccactcacttgttcgtggacattatgggcttgggaaaagccctagaaatatgttcacatggtcatatatctttacaaaatgtatcaaataagaatttttaacaatgactttcagtatcacatttctttctaggtgtttcttggagttggggtagctatggttatttgggggctccagctaagagggaggttgttggcaatgcatttggtttgtaattaatgggatatatgtatgtgttttgcactcaatttccattatagttcatcttcgctagtcattccactgtaggaatggcttccaggagttctccagcatctccatgtactgactcaaccggcatcatagcacaaagattcaggatgaaagaatgaaaaagacctagtatttgctagcacagtagcataattatagtaaaaaaaaattttaattgcatatgttaaaataactaagagtataactggattgttcgaaacacaaaggataaatgcttgaggtgatggacatcccatttaccctgatgtgattattacacattgcatgcctgtatcaaaatatctgacataacccataaatatatacactaactacatacccacaaaaattaaaaatttaaaaaatttttaaaataaaatggaacacacacacacaaacaaacatgcaggatgagagggcatattgcatataactgtgccctgcaacactagatgtatgtgcctggaggaagtctgccttttataaagcttcataagccctgcaacatgggtgcaactatgtgctgaggatgctacaaagtatttgcaaaaatttacagaaatatggtttagaaaattgtcaaggtgggaatatatcatttaactgcaataaggaaagatgttttgaaggttattattaaaacaagagagaaattaaacttttctgctttgattgcataaaaataagactgtaccatttttggtcatctttaaatttatttacgatgtaatggaagaaaagctaagaaataaatgaatggaacatgaaaaaacaattaaatgattaaatcaataaaaattattcttatatcaagaagccccttacggcaaaagaattttcaacacacaccaacagcaacaatttattagaaggaaaattttgaatagaagtaatgttttggttcttattcgataaatttaattaatgaagaaaagtgaatcatgaacatggggaaatatttaaattcttacagatttgacacaaaatagtaacaagtatggagagaacacaaactcgtcgtagtcagaacaaggaagacattgatgagcaactggtgatgtatttaatcagtttaaagagtattaaaactagtcattatatgagtaaattttaaatgcactgatatgttatattcaagaaatgcaataaagattttccaaagtttgataatgctaaaaaaagtatgtgccattacaaataacaaattatgactccaaaaggcattttttaaaatttcagtaataagaaaaaaaattaatttgacatcctagaggaaaggctgtgttatatttctattttctctatagaatgatgtttcaaaataatttttatatttaaaggtagagagataatcaaaacatttacagcccatatttgtaggagtcaaggtattatagaggtggggtgggcagtttcttaataaaggtaccttgtctctctgattttgtgatgttttcattgtcagctttttaacttggttatttgtcataaataagtttcccattctaaacaaattctcacctaagtttgaatccacagacacagcttccaaactcatgtctttttaggcttatggatcctgtttggtgggccattggctacttttcttgaatatgattgctcagaagtttaaatttaagaagtcaactgaaatatatataaaggacaatcacagttcaattgacttagaaacatcgcagtcaaaaagtaatagcctcagcagctctgtctgtatttgtgatggcttgcacacagcgatttaacttctggaattcatctaccttgggtgttgtgttcaataaactgaaatcctgataagaataagtgattctaagtgaaaatgatgttaactaaatgcaggtcaaaattgagtacagggattttttttaagcaaataaaagtataaatagaactttgattatatggctgaaggggaaaggcacaaggatttttcaccaagtatttaaaagtattagtgaccaaaggggagggagaacattagaacaaatacctaatgcacgcagggcttaaaacctagatgacgggttgatgggtgcagcaaactaccatggcacatgtatagctatgtaacaaacctgcacattctgcacatgtatctcagaacttaaagtaaaagaaaaaaaagtattagcgaccaaaaaggatgatcaactatgtatgctagacaccaaagaggtgtgctctgggatatgattaattcaacagaatagtaaaagtggaagttatgagtttggaatgcctggtccaaaggctttgccaattagaatcttcataatttttaaatctagtgcagttcctgaagttgtatggcctttgttttctttctagaaatcctaccaatcttagcatttgaatacagggaatatcaaacgtgtatacttcatttaacctactgtaaatgagtcatacttcaacatttttctaattggcaaaaaaatacattattttttaagaggtaggaaaacataaattatttctgtattacttttgtaatggcaaagctgtagcaaattaaatactatcaaaagtgtactatacggtaaaggttgcaaactgatgacccaagggcaaaatcttttcactgattaaccaaatcagtgtttgaagtgggaggtttatgatgtcatgtgttattactggtgaagttaaccttcttcatttggttaaggtggggtctgtcacaccataaaaagttactatatttttccctttgcaatcaataaatatcttgagggtgacatttaagattatgcaaacatcctgctctctacaaactttgtcccaatatttttagtatctgtcagtagattgtgtctgccacaattgttactatgctatttgccaaatggtaattttctgtttctctcattccttctatgtttattaattagaattcttcagtcaaggagagctgtcccttctcccccatttatttatttatttattcaattatttattcatttatatcaccatgtacatgtggatatttattttattctaagggttataatgcaaaactcttgcatataatgcaaaatgattttatatttggttgccccaatttttccagttctggccacttggggctcctgcatgttggtttccgtgtcctgtgtacatgttcttattatttttgtgtgctaccttcctttttggcaacacaaaaattctgagcagttctcatagtttccctgccccagccatggactcaatcacttcttcaaggagactcattttcttttattggagaatggtgtttagaaaccaccaagatctgggtgctaggtgctatagtttgagtgtatgtgtccccccaaaaatttatatgttggaacttaacccccaaggtgataatattaacaagtggggcccttgggagatgattaggcaatgagggccctgccctcatggacaggatctacggccataaaagaggcttcagagagctgcttttgcccttccattccttccaccacatgaagacaccgagatggtgccatcgatgaggaaggatcctccaccagacactgaacctggtggtgctttgatcttggatttcccagactccagaatcacgagaaataaattttattgtttctaagtcacccaatcccgggtactttgttatagtgcacaaataaactaaaataagaggtgcgctgtttgctactggggtgtcattaactgtaggttctctcagagttaggaaatatacatatgtgtactaacccatgcatgtgcacacatctgtattatagataacctcaatctaatcacaagaagccttcagactaatccaaattgagggatattttacaaaatagctgaatagtacacttcaaaagagtcaaattcacaaaagaggaaggaaaaataactcagtttgcaagacactaaggagacaacaactaaatacattttggatcttggactgaacagagaaaggatgttaatgagaaaactgatgaaatcaaacaaggtctataagttcagtttacagcaggagttggcaaactacagcccatggccaaatccttcctagatctgttttttttttttgtaaataaagttttattggaacacagataccttcatttgtttacgcattgtctatgactaatttctcactacaatagcggaattaagtcgtagtgacagacacctaaaatagttcctatctggcttactacaaaataatgccaattcttcatttatagtattgtgccaatttaaaattccaattttgggtaattgtattatggttatacaatatgttaacattaaggatgaagaacatatggaaatatttataccatttttttgcaagttttctgtaggcctaaaattatttcataaaaatacaaaaaaattagctgggcatggtggtgggcacctgtagtcccagctacttgggaggctgaggcaggagaatggtgtgaacccagggggtggagcttgcagtgagccaaaattgtgccactgcactccagcctgggtgacagagagaaactccatctcaaaaaaaaaaaattcataataaaaatttaaaatttatttgaatgagatgctaacatttaaaatacaggagatttcacataaaacttctgtttgtagtttcttttgaaaagttaggatgtctgataatggtggccaacaatcagagcaaactgaaagttggtacctttgattaatgtgtatgatactgctggttgttgtctcaatatccacttccatagcatcagaatcctgattttatataggcacgaggtattatataaaagaccatatttctcagtatctcttgtacccacaggtggtcaatggaatgcaagcacaagcgttttagtgagactttagggaaagctcattagaatgagacggcaggctgaatgagccctatttgatcttccctgcttctactgattcttgcctagaaaattgatgtgatggctggagtttcagcagtcctcttggaccatgaagtgagaaagaactcatatatctatccccactgcaggtagagctcaaagatagaagaaacctgtggtagatttgctgtgttttgtttttttgttttttttacatattcttgtactcatgcccaacatggcaaaactctgtctctacaagaaatacaaaaataccaccagccaggtgtggtgatgtgtgcctgtagtcccagctactctggtggctgaggtgggaggattgcttgaacctgggaggtggaggttgcagtgagctgtgaccatgccactgcactcaagcctgggcaacagggaaaaaaaaaaaaaaaaagagagagagagagagagaattgtctcgaaaaaaaaaaaagagaattagaatttttcaaacaaatgctaaatcatgttctcctaaaaacagtcataaaaatagacatgtaaaataattagttatttatatgatagcagattttaaaatatttaagattatttttattaaatatataagaagtgtgtattaaaatatattagaagtgacaacctataaattaaaatacttaagagctattaacattttatatctctaacaaaaagtagtacaattcaaattgatgtttttatatttactatttttaaactaaatgccagctttcatcaataaaattaccatgacaagaggatgtttcaacttattagtgctactatactgctatgttttcagataaatttttaaaaagtacacttctgtggaaccttctgcttttaaacaattctctcagttacataagaaacttaggaatgtcaagcccttgctttcaatttaggtatttatcatttcttctgcgtcacaagcctttaccaaaaaagcaagaatatatgcacgcttacgagtgtctcaggctctgaagactctttgtaaaaggtagaaagctcttgacaacaaactggagaagctatgatgatatcggtgtgttcttacatgtcatgctgactcctgtggattgaaggcatacacatacaccactaaattgcagacacaagcaaccactattagcccaagcaagtgattttctgtttcactaagctctgattgctgatttcaaattcttgtatgctggtttgctgtgctaacccttgatctattatataaggactcagccttatctaatgaaaaatgactgggattcacatttgccaatggttaacaggaaacgtttcccaaaagcaaatccagaggttagataagagaaaattcctgtgctgccatattcagcaagaaacatcagtgaggtccagtgaacactgacatagtgggagaaagcttgggtggatattatcttgacaaggcttgatgtatgtagggactgggggcttcattcaccaacacattttggttgagcatatccccttggtgaagaaacaagctctaaagtatcactgtctaatagaaatataatgtgaaccataaaacataataatatagaaggtctgaagtgaatataaaatgtcaaaattaatagaacaattttataatcacattataatcaaatgtgagtcacaaatataattttaaattttccagtagctgcattaaaaggaaaaataaagaggtgagtttaattttaataatgcattttatttaacaaaatataaccaaaatatcaccatttcagcatgtatcagtaacacattttcactcatttttttcataataggtctttaaaatccagtatgtgttttatgctttcagcacaaatcaatttggagtagccacatttcaagttctcagtagccacatgtggttagtggctcctgtattgggcattcaagtctagaggaactctgtgatttactgtgatggttaaaggatctttggaatagcaataaccagagaggaaaacaatgacatttcaaatataacagattaataaaatttctaaaacatgttgatagaaattatactagcaagacaaaagctgacaccaactagttggggttttattttagttttaaaatatgcctgttctaaagcagatactttgcagtgtagaggaagtatgttaatggaaattggctcatttgtaactaaagtactttgcaagtagacgaattgtggggacattaaagtatgccagaataaaatccattaagccttagttaaaatcccaagcaaataataaaacacatttatttatattctgcagcgtgggtaataaaacataataatatagaaagtctgaagtgaatataaaatgtcaaaattaatagcacagttttataatcagcttccaatgaaagtattagtctttaaaacagaattcatttacatggaaaattgacatgtaaggattttctcttgagtcaaatgagctcatttaaatgatctatagatacattaggtcaaatagaaggtacagaggtcaggtggcatgtcaagctgtaaaacttctagccaaaaattagtactgcatcaaaaatggaaaaaactcactcttctgaaagtttaagttaaaaaaaaagttttaacagcttaagtactctaacatcaataaaatatttcaagcattaaggctgccaaattacctgataactcagtaatacttaaagtgtgctttctagggtaaattttcatttgcattccaggagattatgaaacaaatagtttgtaccaaacataaatggaaaaagttatgcatttttaaaactttctgatgatatattatgcatgtgttcattatagaaaaattgggaaaatgcataaaaacacaaagtagaaaaaaaatcactcagaattccagtactcaagacattgttgacattttagtctacatccttccaggtttaaattagcataattattactgccaggtctttgtgataaaataaactcatgtgagctctcttgtagatctgattcctccaatagctctgataattccacttggtacatacatacccacacacttccctttcctacacaactgtctacccaagggctatagggagttcaagggttctctaatcttggattggtctgtcaatatctgtctcctgttttgctctttctctcactccatcctcttcaatcataccccaacaaaatccccaaaatagtaagacctctgtctggacatgctttcttccagttagctctaagatttgtaattctcccttatttgagaagaaatggtgcttgcgtagacaccaattatcatctttgattatttaaaaccctaaaacagtagcataatctggaaaagacatcaacttctctctcttaccaatactgttggaactagctgataaacataacactttgtttgtattttactggacactaatttgtgtctggaagaacctactttctcagaactagatttaaatatttatcaggtgtttaaaagggcagatactggctagggactggatagtgaattatgcataaatcagacatggtcttttgacctcacagaagtaatagtttagtaaggaagatagtttgtaatcaattaaacaaatgcatgcataattacacactgggataaattctttgaaggcagtgaatattgatgttgagatgagataatacattacttttattcagctttattgaggtataattgataatttatgtatacattgtgaattaattaccataatcaagctaattagcatattcaacacctcacatagttaccaatctctctttctttctttctttctttctttctttcttctctctctctttctctctctctctttttctctctttctatcttttgacagagtcttgctctgtcacctagcctggagtgcagtggcacaatcttggttcactgcaacctctgcctcccaggttcaagcagttctcctgcctcagcctcctaagtagctgagattacaagcaggtgccaccacacccaactaatttttgtgtttttagtagagactgggtttcaccatattggccagactggtcttgaactcccgacctcaagtgatccacccgcctcatcctcccaaagtgctgggattagaggtgtgagacaccgcacctggctctttctttctctttttaaacaacattactcgtcttagttcctgccatgatggctggtcatttgaaagactggcaagaattcaggaagtttctctacccatctctccagacctgattctctgctcagaagcataccactacggtacaaaagtaaaaataaaaattaaaaataaagtccaaacacaatgatctgtgtggagagttcctacactggttttaacacattttaaatggcttcctaaggttgggtcattaacatgaggatgctctccttttaatgtgaagtagaaatccttccaaagaccatcatagagaagaaggtgtcttgaggaagcttctgttagatttcctgtggtaataggtgaatttatcctgttaactctactgtgggcttgaagttgatctcagatgtgctaaaagaaaagttgtaatctcaaagtttttgacagctttctgtattaggaaagttgaaaacctggggaaatgtttgggtctttgtttacaagaagctctatattgagtgtcagtatatgcaaaagcaggccaaaggtctgtttggaaaaagtcaaagagctaggatggcctccatggaagagtaaaatgaatttggtaatggtgagtgggaaattaaataaatcaaaaagggaatgataagagaagggatacatacagggagagacagactaacagacagagatacagaaatgacattagggaatagaaggagaaacaaaagagaaatatgtacacagaaagatacaagaagaaagcaagagagaaaaagactgatagacacacacgcgcacatgcacacacacacacacacacacatacacacaggccacggggtgggagtcagagaaaaaccccaggacctgctaataattcacacagccagtgagaatttccctgtagctaaaaatgtctgatgctttcagaaatgttaataaccaacactgatctaaaagttttctctcattgtgtgtaataactactctctgtaaatcttaataaagtcgtctagcaaatatttcccctagcattagaggtgttttgcagaaacgaaggaagagacaggtaaccagtctaggacaaccatactggtgagagaagatgctatgggatacaagagccccagaacaacaaaagggagaaacaggtttccctgtggctgactcagaagtggtgaatgaactgtcatttgtcaaaattattcttgaggaaagtatacagaatacataatgctatgtacaggaaaaggatttttcatttattgaatatttactagctatgtgctttaaagatcagatctcattctttaaaataaccctaccaattggttgtagacactttcattttttcatattaaaaaaatcaaggcctaagaaagaatttccaggatgtggtgcagggagggggaacccaggaaaagatcagttccctgagttttgttgactgagctaagagaccaaagagacaaaaggagctggagttttccagacggagtaccagaggggagagctggagagagactggggtagggggaaagtgaggcaggagtgaaaggaaaaaataaaaaattccagagaatcagagatttgtacaatgtctccctcaagtattcgactgagtagtgatcaattcaagcatgtgaggaaactacttgaggctgaggaaagaaccacctaaaacgtttagaggttaccatggccaaccttcacacaaggccaggaatggtttctgttttcatcagcaagactggaaaggccgaagatccgtggacgttaggtaaagtactcaggaaggtcttgccaaaatagatgggaataattaccccagattgagcgctgccctagttgcactgaagaaatcttcaagcaagactaaaaaaacaaaaaatagaaacaaaaacaacaaaaaacagcttccatgtaacttaactgtgtctcaaaacaaagctcaagaatattgataggactataaaaatatccaccactggccaggcgcagtggatcatgcctgtaatcccagcactttgggaggctgaggtaggtggatcacctaaggtcaggagtagttcaagaccagcccagccaacatgacaaaaacccgtctctactaaaaatacaactttgagacatagcaatagaaacaatctattttttttttttttttgagatggagttttgctcttgtttcctaggctggagtgcaatggcatgatcttggctcaccacaacttccaactcccaggttcaagtgattctcctgcctcagcctcccgagtagctgggattacaggcatgcaccctcacccccagctaattttgtatttttagtagagatggggtttctctatgttggtcagcctggtcttgaactcccgacctcagctgatccacccacctcggcatcccaaaactctgggattacaggcatgagcaactgcgccaggccaatagaaacaatttaaaatgaaacacatagggaaatgatctaaaataaatgaacaacatatgaccaacctgtggaacaacttcaagtagcctaatttaagtgtcagtggattttctagtgaagaggatacaaaggaagggacaaaagaggcatttgaagatataatggttgaataaatttccaaacttaatgaaaataatgtatctaaagatttaacaagcccagtgaatcctgtcaaaaataaaatcagatcaaattaaaaattttttaagtttattgtgcatataaaataatagttcatgaactaagtgacctcaagcccagtcataagaggaagctcagaggcatgatgttacaggctggcttacacagcaaaaatggggaagttgtttaacctttaaaatgatgggttattatcatgaaggtttcaagatcacagaggattggttgaaagtgctcatcttataccatctttagaaggcaacttaagattggtttacgatgatcagaagtgtttacaagaaataactttaagtttcgcttatgtggccaaattggctttgtctgttcagagaattctgaagtctggtctccatgttattttatgttcacaactccaggcacaagaaacatgaagaaaatgacactataacacatcataattatattgctcaaaaacagtgataataagaaagtctcagaagaagccagtgggggaaaatatatgaacagagaaaaataaagttgccatcagatttcttattagaaacagtgcaaataggaagacagtagagctaaatctttactgaaagaaaaaaaacccatcaatctagagttctatgtccaacaaaaatatattacaacattgaaagtgaaataaagatattttgagacaaaaaaaaaagcctgatggaacaaatagaaaagacatagcaaggtgatggacataaactgaaccatatcaataatcacattaaatgtaaatggtctatacaccccattaaaagacagagatatcagattggataaaaaagcaagactcaactctgtgctgcctctaaggaacacagtgtatagatagacacaaataaattgaattaaacaatggaaaaggataggctagaactaaccaaaagaaagttggaatgcttattaatatcataaaacatagatttcagagcaaacaatattaccaaggataaatttcataacaataaaagagagaattcatcaagactgaacaatcctaaatgtttatatgcctaaaaacagagtttcaaaatacataaagcaaaagctgacagaactacaaggagaactagacaaatatgcaattattattgaagatttaatgctatctcaataactgatagaataaatacagagaaaatgttttaattgcagtagtaattagtaataattaaaaaaaagcaagcaacccaactaaaaaatgggcaaaagattttgaaaagcctttaatgaatagcccttcatgaatatttagagatgacaactatacacataaaatattttccatatcattagtcattaggaaaatgtaaaatgaaaacaaaatagagtatcactgtgttcttattagaattgctataatttaaaagattaaccataccaagtgttagtaagaatgtggaggaactggggctgggcacggtggctcatgcctataatcccagcactttgggaggccgaggtgggcagatcatgaggtcaagagatcgagaccaccctggccaacatggtgaaaccccatctttactaaaaatacaaaaattagctgggtgtggtggcacgtgcctgtagtcccagctacttgggaggctgaggcaggagaattgcttgaacctgggaggtggaggttgcagtgagccgagatcgcacaactgtactccagcctggttacagagagtgagactcggtctcaaaaacaaaaaacaaacaaacaaacaaacaaaaaaacaatgtggaggaactggaactcttacacattctcggtgggaatggaaaattgtataacccactttggaaaacagtttggcagcttttaataatgttaaacatatgcctactatatgatccagccatttcatgcctaggtatttacaccagagaaataaaagcatattcccatacaaaggcttatatacacatttataataaccttatttgtaatagccaaaaagtggaaaccacacaaatgtccatcaacaggtgaatgtataaacaacttgtgctatattcatactatagagtactgtttaacaataaatagaataaaatattgacacatgctacaacatgtatgaaccttagcataattatgctgagttaaggaagccagaggaaaaaaacatactgaacgatttcatttatataaaattctaggaaatgcaacttaacatacagtgtcagaaagaagatcagtggtttcctggggacagaggttgggcagacaggaaaaggcatgagagaaattttaaaaggctgtaataaaacttcagagtgatggagatgtttgctatcttgattaaattgatgacttcatggttgtatacatatgtcaacatgtatcaaattgcatactttaaatatgggcagtttgtgtgtgtgtgtgtgtgtgtgtgtcagttacaatgcaataatgctgttcatttttttaaggagagtaaacattcagttttttagctgcaatagtaacatttcaagtgcttgataaccacgtgaggctaatggctactgtctggtctgtgcagatataaacatttccattaatgctgaaagttcttctagacacaactgctctaactcctctactgtatttaataagtgaatgataaatttaaaaagcacacagggattattcttcctttcacaaatgcttcaggtactttatccagtatttacaatactctgtaatatatgcaaagtctctcaaatatcatgatgccacaccacagtgaaacatttttctttctgcagttgaatcaacacaagttctttctttgctttcttttttttttttttaaatcacagcttgaaaccattttctaagtgctcactgacttctctacttggctagagctatagaaataaccaaacattccagctgcgtaaaatgatctctgtatttaatctctcttgttatacagagataacaagaaacttgcatgcatttggagtgcaactcatgtttgtgaaatatattactatactgaaattgctggctcttctaatatcatccttagtttatgttatgggagttgaatttcaaatcaccagaaattcagaaacaggtacactaaattacctgcccaagggacagtgccatttttaatttatgctatactttcttttgatttttaaatagtcttttccaaaagctaaatgacatcaattttcgatatgaacctgtacctctgccccaactttttctcaggggtcagattagtgacctgagtgtgactgaataatcaaacttttttgaataatcaataattttccaagcataatttgagagaatacaagactgactggaggatagaagggaagtatgttttgttctcagaaaagtccagttacaagaaaatgctcaagatagaagcatatcttctcaccatgattctcaatttggaatcagttaagataaaagtgagggtcaaaaggcctaatcaaacttggacatcgacccatgaaaacacaggtcgtcactgaagcagtcaaagtctttgcttctgtctagcttttcatgctcagttcagtatctcatgccaaccagaagctatatttggcagttgcacatatttcatattttagagggagaaataattattaagaactctggtacaaagaaatttccaaatgtggagtctatagggaaaaggaattaaaagcgttctttggtggaaaaatgtcggagccactactggactttaacagcaaacaccttaattaagtgttaataccttggcagggattagttgactgctggcagagaacaaggtgctcgcacaaccgaaggattagaagggagcctggcagcaatgtgaaggctctaaataccaggggcttatttggggagtggggcatgtctaagacaaattggtattctctagaaatgatgtgaaaggcatttgtgtggaggtggaataagaggcctggctctgtctttttgctatccctaacctgctaggtaacctgtagatttggtaatgcctccatcattcaccctccttttacctataccttttgccatgtaacattgcagtggctccccaaaaggtagttatacttctctaccccgtgtgacttgctttggccaacagactgagcaacgtatttgtcctctaagactacatcttgagagacctatgtgttttctcttgtgctcttgcaccactgccctgaacttgagaacgtaccttggctagcctgctggaagatgagagacagagcagattcgagttgccccagtcttttgagcggaggccagcctcaatcagccaacagccagccaagtacagaaatgcaagtgaacctagctaagccaagatcataagagctgattcaagatcaatgagcaataaacattcatggcaatatgcctctgaggttttgtagttgtttgttatgcagcatgactgcagcagtagataactgatagggcacacatgctctctgaaatgattggaaatgaaagggtttaactagatggtctctcaggtgccatacagctcagccttctgcaactgaaccaacacaaagtcttgggctgacccatcaaaatcttttctctgtcaccttagacatacctatcacagaatgcactgtcaaactctaccccatcaattgcctctaagttaaccttatctatgcaaagtcatctgctggacaattataatttacaagatttgtgcactttactttttaaattgtctgcaaagttgaaagacaggagtgacaaatttatggctccatgagacccagtaaagcttccgtttgcttacagagaatagagagagaaaggaagaaaagagggaagaaacacaagaagaagggaaataagaagggaacaagacaatccaataccttaatgaattgtgcacactcctttagattacccttgagcccaccgttatttttcttatcccagccaatctcactcaattacattatacacacagtcccgggaggaatctaagtatgtctagcacggttagcaataacgcttttggaataagctttcggaggaatgagctcaatattgcttttggattaagctttcggaggaatgagctcaagtctccactctcttggttaagaatgatatgactttggcaagctacttgaccccttttagcctcaattttttcatctataaattaaagattaatacctgtccagactacttcagagggttattctgaggagaaaatgtgacaacatctgtaacactgatttaaaaaccctaacgtgcttcagaaaatgttaggctctatcatgaggacagttgctaagggcaaaggtctttgttagggaagtgataaggtaactaacttagttaagacctggggatctctcgaggtcttgcatggaatctttgatacatccacttcttcaagcaacactaagaaggatcccaatgatctagcagagaaaaaaaaaaactcctccctctttcctgtcttgaaagcaatacttggaaaaatatcaggctacccttggaagtagctactcagggatcttgcctttgtgtccttactttaaaccctaccttagaaagataaatggaggttggacgctaacggtggtcccaaggtgaacagattttcttaaggcacagagcagggagagctgaataaggtcatgtgctatccaaccctcaccacccaagggtatccaggtgccacacagagctgaccttcttagagaagattcaaataaggatcctccccccaccccaatgttactgtgaatctgtgcacagcaagaaaatcaacagacagatggcactgtaaatatcaggtgccaagtgtacactgcttcttctatgcaaaagccaaataaaaagtgaaagaaaattgtcttacttttattattgtctccatacaaaggttaactatgaaactgaagcagatcggcctgtaataaaaataagagccccattatttcacccaagtcactttctcattaatcagatggaagtgggctttaattgttttaatcttgtgcaataaaagcatctaaatatcctataaataaattatacacactgatgatcactctcttagctgaagtcccttaggcatcttcagtataagcaaatataccaatttctgttcaaactgcagacattccactcacaacctttgctgttacatagtcctctttcatttctgctgttttccctatattcctgttgcagaaaactctctctctatcatttcaggatggacctaaaaaaaattggttatctggatttatctacatacttgatctccaaatggtaaggcctcaaaagttccaccaatatctgggtacagtcataagcaaacattcctcaaacatgcctaaaacataattcacgtgtaggaaaaagaattaacagtggatctgtcacttgttctttccctccttgggatgtccctgaggatgcattgacctagacaagaacagatcttgtaaacactgtgatgggatttactaacaggacgataacccagaaacttctctaaggttttagcaggttattcctggtctgccttgattgcttcaggtaattagctggaatttatgagacatagtctgctggagaatggactttagtcatgtaggctccctacctgtgtgactaataaagtataaaaaactggccaggcatggtggcttatgcctgttatcccagcgccttgggaagctgaggcaggaggatcgcttgagcccaggagtttgagaccagcctgggtaacacagggagacatcgactctacgaaaataataaaaaaattagccaggcatggtcttgaacacctgtagcccaagctacctgggaagctgagatgggagaatcacttgagcccaggaggttgaatctgaagtgagccattattgtgccactgcactccagcatgggtgacagatagagcaagactctgtctcaaaacaagcaaacaagccaaaaaaaaacaaacgaaacaaaacaaaacaaaacaaacaaacaaacaaaaacaaccctgaaaagccctaaatctaaatggcttaaactgaactaacttgtatcagactcttaggtaatgcctgtcagtgactcctaaaccaaaatgcatcccagtgcagaaaaggggatctttaggaagtgtatcagaggtgcaaggccccttcagaaatagacgttggaatactgagattgtgcttatgatttgctcatattttttgctagttatcagtgacatttctatgttgggtagggtccatgatgctttgtggaacaacaatgtgctagaaacaatatctattcttaaagagtaagtaaatatttcaagggaaatgccctaattctttgaagtctgtggtgagctgaaaatggcccctcaaaagatatccacgtcctcattcctggaacgcataagttttaccttacatggcaaaaactttgcaagtgtgattaagctcaggatcttgagatgtggagataatcctggattatccaggtgtaccctaaataccatcatatatatccttacaacagagagacagggtgaaatgacacacagaggagatagcaatgtgaagagagggatttgaagatgctggccttgaagactgcaggatgtggccacaagccaaagaatgctggaatccaccagaagctggaagaagcaaggaacagatggtctcctatggcctctggaggaagtgggtccctgtagataccttatttttaggtcattgataataacttcagatttctggcccccagactgagagaatagatgtcaactgttttaagccaccatgtttgaggtaattggttacagtggtcacaggaaattaatacagagcctaaagattaatacaaagtcctgaaacatcagttcattaagtataaacaaaaacccaagtaagcaatatggcttcttctagaacaaataatttatgcctaatagctcattcaactggcaaaactggcttgtgctcctaatgtaagagctagatcatttaagctcattataaacaaagacttttctgatgacattggcattcccagtcttcacagacctttaaaataagtttagtaagtggataaatgagttaaaatattaacaaagtaagagcttggaataaacatcagcaattattgactaaatgggggattgtggattgaatagacaattggcagacccttgggattatctccctgaagaaacagcatcacagcagaacttcacatgaatgagatgtgtgtggtcaaccaccagcttgaatgatgttccacaccagctcaaggtcatgcatgctgtgacttcagcctatctcctcttgcctttggggtaatggttgacacacccacagccctcagcatggtttcttgttttgtttccacatcactctcaaatttcaagttttgtttttcatgctactatgatttggttcctgctctgtggtttcagcaaaatcagctcattttaactatactgagaagcatcttgggaaatgagtggtttaggttgcccatggtataaactgctgaaaaaattttaacaacaggagaatggggatagagagaggacagtagacagacacttcactctttccaagtcccattttcagagtatgttcttagtatttgatttgagatgaagccatccccagtcaaaagtaaacagaacatatattacaaagctaactataagtaatattaattacctgacattggggctcattcattctttttcttctttcaatcttagcgattaattgaaagttgtcagtatcaagttatttcttactaaattgccatcatttagtcaaaagctgaaaatggtgcatttatctttttttaatgtcatttttgctgtgagtgacaccacatcaaaaagcaatttttgcttttaatatatgaatcacattcgacatatcaccaatgtcacagttcatcctcttagaacaagcttgtagaactgtgacattggtgactcagtttgtgaaatgaaaagggccacaaaaaggaaaaaatcctttacagctattaaattaagcaaataataggtggtcaatttaatacctataactcatcttggctaatgaatgggttacaaaatgattaacctaatttattagtgttgcaatattctgggtactctatattattttcatgcgttgatcttacacttctacactagtgcctctttacctgtaatgtgtacatgaatgccttggtgaaaggcaggttctagctttgtaggtctggggtaggacccaaaaatctgcattttaacatgcttttggtgataccaatgctgccactccatggatcacattttatgtagtaacgttttaaatgaatgaagaacagaaaaatgagttaattctgcctaaatcctctaaatctgaaaagaaaaatgagataataaaagaagggggaatgccaatgtaacaactaaaaaaaaagagaaatatgaatccagtttggtggaatatatattgttttctcagtacttgtggcctcagctttttctcccctaaaaatcagtaatcaagagaggatatgcatcaaagagaagaaagttttaaaaaatgactcagagaaaacccaatgttaataaaaaatgttcccaaaactttctcatctcccatacagagaataaaatcttctcttatctggtaatgatcttccaaagactgagatagccttttatttgttatccaaaggacaaacttcccagacacttcccttttggctgatagacttcatacagccatagccctgccctgccccacacaccctggacacctgtctcttaaggcgctttcccattgagggctgcctccatcatggcagtgcaggtcttggaacgcatcttttctctatcacctacatccctgcccaggctttcttgtccagaaaccgcacagacattcctcgagctgaaccagaaaagccaacagtaccaaatctctaactttttaaaaatgtattcttcaaattgacatatggcttactacaatatatacaacatactacagtaaagtgcacaaatcttaagtgtatggctcaatgaatattggcatatttggacacccatgtaacaacaactcagaccaagatctaaagccgtgccatccaatagaattttctgcaatgctggaaatgttccataaaaaaagataattatgcactaattcattagccattagccacagtgttatgagcacctcaaatctcattaatgtgaatgagaaacttatttaattaattcaatttcaaatagccacagtggctagtggctgccacaggaaccgcacagacattccttgagctgaaccagaaaagccaacagtaccaaaagcaagagcaaacacattcaaaagctagcagaatgcaagaaataactaaaatcagagcagaactgaaggaaatagagacacgaaaaacccttcaaaaaattgatgaatccaggagctggttttttgaaaggatcaacaaaactgatagaccactagcaagattaacaaagcagaaaagagagaagaatcaaatagacgcaataaaaaatggtaaaggggatatcaccaccgatcccacaggaatacaaattaccatcagagaatactacaaacacctctacgcaaaaaaactagaaaatctagaagaaatggataaattcctcgacacgtacaccctcccaagactaaaccaggaagaagttgactctctgaatagaccaataacaggagctgaaattgtggcaataatcaatagcttaccaactaaaaagagtccaggaccagatggattcacagccgaattctaccagaggcacaaggaggaactggtaccattccttctgaaactattccagtcaatagaaaaagagggaatcctccctaactcattttatgaggccagcatcatcctgataccaaagccgggcagagacacaaccaaaaaagagaatcttagaccaatatccttgatgaacattgatgcaaaaatcctcagtaaaatactggcaaaccgaatccagcagcacatcaaaaagcttatccaccacgatcaagtgtgcttcatccctgggatgcaaggctggttcaatatacgcaaatcaataaatgtaatccagcatataaacagagccaaagacaaaaaccacatgattatctcaatagatgcagaaaaggcctttgacaaaattcaacaaaccttcatgctaaaaactctcaataaattaggtattgatgggacgtatttcaaaataataagagctatctatgaaaaacccacagccaatatcatactgaatgggcaaaaactggaagcattccctttgaaaactggcacaagacagggatgccctctctcaccactcctattcaacatagtgttggaagttctggccagggcaattaggcaggagaaggaaataaagggtattcaattaggaaaagaggaagtcaaattgtccctgtttgcagatgacatgattgtatatctagaaaaccccatcgtctcagcccaaaatctccttaagctgataagcaacttcagcaaagtcccaggatacaaaatcaatgcacaaaaatcacaagtattcttatacaccaataacagataaacagagagccaaatcatgagtgaactcccattcacaattgcttcaaagagaataaaatacctaggaatccaacttacaagggacgtgaaggacctcttcaaggagaactacaaaccactgctcaatgaaataaaagaggatacaaataaatggaagaacattccatgctcatgggtaggaagaatcaatatcatgaaaatggccatactgcccaaggtaatttatagattcaatgccatccccatcaagctaccaatgacttccttcacagaattggaaaaaaactactttaaagttcatatggaaccaaaaaagagcatgcatcgccaagtcagtcctaagccaaaagaacaaagctggaggcatcatgctacctgacttcaaactatactacaaggctacagtaaccaaaacagcatggtactagtaccaaaacagagatatagatcaatggaacagaacagagccctcagaaataacaccacatatctacaactatctgatccaaatctctaactttttaaaaatgtactcttcaaattgacatatggcttactacaatatatacaacatactacagtaaagtgcacaaatcttaagtgtatggctcaatgaatattggcatatttggacacccacataacaactcagaccaagatctaaagctgtgccatccaatagaattttctgcaatgctggaaatgttccataaaaaaacataattatgcactgtctaattcattagccattagccacagtgttatgagcacctcaaatctcattaatgtgaatgagaaacttatttaattaattcaatttcaaatagccacagtggctagtggctgccatgttgaacagcacagccctagaacatttccagcacctcagaagtttctctcgtgccctgttcctgccagtatcctccaaacttaactcctcttctggcctccattaccgcaggttagtttggttatctttagtttaaatttattgtgattgaaaaacatattttagttttttagatctggtgctttatttgtatgaataatatgaaagcaattaagaaataaccccatagctgtgcacaaaaaaactcagtatcttactttactattgttattatcattgacattattatttcaaatacttactagttctcacttggcagtaattaatttttgaaatatccattgagagctaccaactcacatacataattcacacacacacaattcagataaaaatataaccttcaacttatccagtattcatttaaaataatatagagacagaactttctaataatctataattcttataaaacatatctgatatttgaatgtatacaattggttttatgccttttcccacttatgaggttgaaaaatcctgatgacaatgattatttaagatctgacaaaatacagaaaactgttttgtacatagcacctgtccagggctcactcatggaaagcagacgataaatgagggttctgaaataagtactaatttaaatgcttgttttgaaatgaatgttaatgggaagtcatattattgctgttccatagattgatgtaatcacatgtatttcctgccttttataatatttattacccactaaattattgctacaaaaagtagccagtatacaaactgtttgttctgatccatgacaagacaaggaatccgcacaaggatgtaaatcaattcattgcttccttcatcaggaaagtcttatgtgagagaagcatcagctggactacagtttaactggactggacagggtgttgaatgatttacatggtagcccaagttccatatctccttgctgaccagtaacactcagtttgcagatggcacacgtcctcaggccagattttgagcgtcactgccttacgttatcagctcttaaaagctgcatttcattaagacaaattatccaaacattattcagttctgacttctcagtgttttatagatcctggctgtttagtaaatatccaataaaatattttaagtaaataaattgttgttgagccacatagatcttcagttattgagtgcatcaccctttttcatttatggcctaaacattctaccagagggaaattactactctcttggtggcagcaaatgtttgcctccctgacacctcctaacacgtacaagcagtatgatcagactcaacagaaatattgttaaatagtctaattctatttaacacaactctgctttaagataaaagtgacatcattttaaacagacagcatgaagcataacattgacgaaggaggctctaattttaaaattatagtaatgattttttaaattaataaaagaagaattggaaagccaatgcaacaaaacttttaaatccttctaaataaatcctctcaatatttgggtggtactgggcaacataattgtataaagcactatgtatttgacgaaatacaactactcattatatggtactcaaaatggttagcattttctgttggagtgagttagtcatggtttttatgtataagcaaccaaaagttaccttgctttctggaagaataaagtaatttatgaaatttattgaaaggataacagatagctcacagtgttgcctaaagaataaggaaggaccaaaagaagctacagcagcagtagattctatgactagaattccaccccaacctgcccaatgaggatacatatgtgctattaagggccatgatcgcttacactgtaaccaccatgagtactgatgatagttcctaccatccctatggtcccaattgataccacctccaccaataaaatggattctctcctgctccacttctttacattatagtctagagtaggtttatctgatttcccaagcccaggccacatgtctgtgccctagctaccaagaaagttgacagtgtatggcatttttggcttctgcagtctcccaaaacaagttctcccagctagaaaagagattgtagatatttggtagcttcccaaaattacaaatgtgcactgcaatgtgtttccaaattagtcatgctaagagattatatgaataattactactgtatagatataaatcattactaatgtatacagaatctatgaggtaaaaggtcctctagtgtctttgaaacactatgtcttattcaaaatgtagtcttatgactcaaaatattttaacacaaacacatttagatgctttccatctcgggagaggctttgcaatattcaaattcctcctccatttctctccctcacaatgtatttcccaaggccatcatctaattaacaatcacaaagattcctacaatacaactgtctttgaaacgactggtttcttcattagcttgcttctctctcctcatctcttctgattagcagctgataaaaggaaatcaaaagcacctgatacccatttttcatgatggagagatttcatttctctctgaagcatgaataaaattcaattttatagtactttcttctccatttggaaaacgaggctctgaacactgaggcctttatctagcaaagacccctttctgaaaatgtttgcttacgttgtatcaagtaagcaatggactaatacatttcttttgtaagagtcatcactatatacacagcatcaaaggcatctacctttaattccttggaccatatcaattctatttccataacaaaagatcatttgtcatgattaatacttatgatgtgtaactgggtatgttgctatgaaaatatggaaataaaaaacccattttaaaaggaaaggttacaaggattcctgttttgtttttagtaaaaaattcatgtagggagtctgctctgtaagacatcaacaaacatttacttagcaactaatatgtgcaatgatgtgcataatcagacgctgtgtttttcttttttgtaaatgaccaaacctcgtgagatagatattgtctttgactttatgaagcacacatctggtggaagagattggcaataacgtgtaaattaacaaactgaacagtattatgaaggaagtacacaaagctacacagcggaaagtaatcaggggagtcctgcttgacataggtgactaaggaagatgtggttgtatgaaaagaaataaatcatatgaaaagttgcagaagccacaagccagaggcagggtcaagcaatcacaaagtccttgaaacagaaggggtttgataggttccaggacttctaaggacacaggtaaggctagaactgggcaaggggcagatcactgtggcaactcttagacctcagaaaggagcatagatttattctaagagcaagaggaaaaaacttatttatattttcaaaaaatcatcatgcctgctgtgtgaagaacggattagggatggccaagagtggaagtagggagataagttacggagttactgtggtctaccaggggagagataatggtggcttggattagcagtggtaagaggtagatttaacgatatgataaatttttgaggtggtatatatcctattactctgatttgatcattacacattgtatatatgcatcaaaatatcacacatagcccataaatatgtacttatcaatttaaaaaatttaaaaataagactaaggaaattgaatgataaaatatgtaagaattactgatttaatatggggaatcagcgtgaggcagactgtaaaaatgaccacattttgccatccttccttgtatccaagcccttgcaatgtgacttcacaacccctctcatcaagaggtggagctgttgtccccatgacttgaatctaggcttggctatgtgacttgctttgaccaattgaaggaggcagaagcacgccaaaagttctgaggctaggcttcaagaaggcttgcagcttccaccctcacttggaaccctgtcactggcatgagaacaagtcttctgcaatatgacagactacacagaaagtggcctcagttatcctagaagttccagccatcctagaagagggcaacccagaccagccaaccccaagctgatctccagcagacctcacacacatgagccaaccagctggcagcaacctagctcagcctagatgcacaataattccccagacgacctggagaccaataagtgacataaatgcttgttctaaattgctaaattttgaagttgtgtgttacatagcaataatctattgttacagtgggaaagtaaagaatcaagtatgtttacactatgtaacttataaaagtgcaataccctactcaagaaagtttgcatttgtttttttgattaagatttattatcatcaaaaaaggccatgctactcgagcatatagtataatgtattgtttgaggttgggtctatattaacagctatgaccatgaactatatgataaattcctattctttaagcttcacattaataatgccaagtaagaatgcaggagtgtatatagagtttcacagaggagtatttttttcttaattcttggggccaattaacatacaattttccacttcttatgttaccaagaaggacattatacatacacacacaatcactcatactcatatccctctcctaatcccatcattgtatgaaatgtgatagcccataaagggaaatcctaatcaaaaagctaacaaagagcaaaatatatttcttatgttttgccaaagcctactgaaaacacaatcccaaataggtgctcatctgtagactgttgtataagaaagaacactggaggaagaccagagagacaaagcagaataccagaatatctctgatggcatttaagctccagagctcctcatggatcaagctgaggctagacttcacctgagcccttattttgtgcttggcttctcctcctgcctatccagtttccctcactcttttacagctttctccagagagcattccctcaataagtcatttgcacaaagaatctccatctcaggtctgcatccaagggctcctacctaagatgcctttttgcaaagtttgatacttaagactccaatcaattctccccttcccatatctttccagaaagtttcattttgcttaagatagttagcatcagtttttactttgttggtaaccactgaaaattaggaaataatgtaactgcccagtgagttcattttgcccactgcccagatattaatacaactgtggatttatcaagacaggggaattgcaataaagaaaaactttaattcaccttattgctacttaaattggtctcccccagaatttggagactggggtttcttaaggatgatttggtgggtagggggccagggagtggagagtactgattggtcgggtcagagatgaaattacagggcatcaaaactgtcctcttctgttgagtccattcctgggtggggccatgagaccagatgaagtaatttactgatttgggtggtgccaggtgatccattgagtgcaaggtctgaaaaatatcttgagcaccagtcttaggtttgacaatagagatgttttatccctaggagcaattggggaggtttagaatcttgtggtctctagctgcatgactcctaaaccataatttctaatcttgtcgttaatttgttagtcctacaaaggcagtctggttcataggcaagaaggggttttgtttcagaaaagcattgttatcatgtttctttcaaagttagactataaactaagttcctcccaaagttagggctgtgcccaggaatgaacaaggacagtttggaggttataagcaagatggagttggttaggtcagatttctttcactgtcacaattttctccctgttataatttttgcaaaggcagtttcaataagttgtatagaaaggaactcaactacctttgtctatcgggaaatgtctttaaaaagtttcaagaggcaatatatctcaggaaattaaatctgtgaaaataaaacatatgattttaaggattgcatcagctgaccaaatgtgatgtgttaacgaagatgtttaaaaagtaaatgtaatcttttcaattacagttacattagcatgatttcaatagccaaatgaaatacccacacccattcaaggcaattattatgtaataaaacactctacttattatactcaggcagttaaatcctactgaaataatctttctggcataatacatgactccagaaatatcctgcatatgcaatcagctgcagtaaaatctttgcaagtgccattgcttcaagttaacctttttttagtgtcttgaacctcaaaagtcaaatacactttgaaaacatcaagtctttaaattattaaatgctttcacatttcacccaatgaataaaacagacttaattaatagagagatcacagcctcactcacattagcaactcaaataaatgcctcatagggctccactggagatatgcaaagacacagtctttgacctgccctgctggcagctagttttcaaaggtctgtaaagtttatgccatgaagatgacacaaaccatgattcagccatgcatctgacagcctgtggggaagaggtgtgagctgcccttaaattaggcatgcagagatgcaaaacacggcagtgtgtgtacacaaccctcctaactagacagagttcaactcattttatagttcagttcagttcctaaaaagtctcctgtaaatgagttcaaagcaagaatccaaatcaaggctctaatgaaaggaacactgagatgaaatgcaccaaaaagtgagaaatcctcttttaaaaccaataaccactatccatcttacttgcttttccatatggcatctgattaaagtaagatggcaacccattgcagaaacctgtcaacccattgcagaaacaatttgccaagaacctgttcttcatggctcttatatatggatatggtattctgtttactgtctgccttccccatcactgaaacatagctccatgaagatagggttttgtttcatcactgaggggccacagggcctgtgctggcccacaggaagtgttcagtaagtatttgctgggtgaagggagaaaaaaagagaataagtgaggactgaatttgtgctaattaaatcccaaactcatactaataaaaacagcagcaatgcatttgtgaagacattgaaaatgttagttttcaaaatactaatattaatattctataaaatatgtggaagataaccttttccaggttttatgtcttgagaaatcagaggagcacaatctagttgagaaagtaaagcattagttgagccaaaaatgtatctacgtatctggttctctgatgcattgggtggagctggccttcagtgtagctcagagggtaattgggacacatgccccaaatccagtaaatagcaatgcaaacactggtgcattcccctacaactgcactgtttgatacagtagccacacaccacccccagcctcccatcccggcagctgctgagcacttgaaaagtggctagtttgttgaaatatgaaatgcgttgtaaaatacacaccaaatctcaaagttctgggacaaaaagtgaaataactcattaacactttttacgttatctacatgttaaaatggtattttggatgtactgggttaagaaatatattattaaaattaatttctcttgtgtctttttacatcgtaattggctcctgaaaaaattaaaacaatgtatatagctcatgttagtgtctcacattaaacttttttggacagtgctgaactaaggcatgtcctctctctacacagcaaaggccggttactgcaaacatctgtaacttattacccagagggcctttatctcactatgggaacacacctagccctagtgcagggaaagtccgtagtgtcaaatagttcatgactctggaagcagtttttaactgatggcagaaagagagctactggttacaccagctttcttgcctttcacttgggacaattcaggggcatgttctacaatgtctcctagagttccccagcaggattgagcaccagttgtccataatggcaactcatttgaaaacatacttttcaccgaattctttccctaccctgtctcatttctcctctcctaggtattgcctggggttacttcctcaataaactatacttgtgttagaatcctttctcagggtctacttgtggtacaacccaaattaagacaatatgaaaaaaaaactattacatatattccacatcttttaattcattaaggagttttattacaagtcctcataaacctaacaacttcttaaagctgaagtgtagtgatagccttatgactatcagacctattttcatgcttatccaagataggttgaaaataaaatatgatgaatataaaaagaaaatataaaagttagatttcatcaaatcaaatacagactttaaccccactctagatatttcattggtttccactcagtccagtctttaataagattttaaagctctgttctcttcttcgattttgtttgggaagctctggatttttaaaagaaataccagagttcagaggttctgagattcagtggagggttttgtcatatttcagcatggacttgaatccttaggtcaagtgcttcaacattttctccctcataaaatggcctgacttcaagaaccaagtactgatgaatacactaatgaaatgttccatattctaggtcttccaagaacatttttatgcacatgtatactgatctccttcatgctgttctatttttaaacttttacttgaattctcctcctcttctttcaaaatactttgatagtagtagaatcagttccctggataaaatgcatccactctttattatctcacaccacgtaacctgtcattacagtgttttagacgccaagcctcacagtgacaagaacaatcaaatgttgaattcgggcacagacaaaagtaaatatggatgtttgttgctcttggtatataaataacaggattctttgcagaaggagtttgcttcagaagttatgctgcccttgggagctacttcatagccttatttggattgcaagcttttttatactttcctacaatagcaaatgtatgcgatactttctggggcaacaaagaattgtgtgcatgcctgcttttgctcttgaggcagccttagcagggaataatagtgttgctaagtcatttatctgaaaatgtgaggtacggatgtcctttctagccttatgctttgtggtgaactcatcatactattaacagaagtatagaatccagcattttacctccccaacacatgtggccaaaacattagcatagaagggagtggcatcgaacacatgaatgttttctcatgtactgaacaccaacagatctccccacatgccaagcccgtgcaacaacagtgatgtctccttcctatccatgcctaccatgggctagctcaattcccatcttctatctcagcgagtacctggaagggagtactttgcatagtggtatgctgaagccagctcgcatagaacagtgatagctgattgcagcctcttgtttcagccccactaccatgactttgtgacattgcattggtagcttgaaattggccatggtatttagattttgaaaacttgccaaggctaaaattcaaggctttcccccttggagtctaggttgttaaatatttatcagttcaccactaaatgtgtgggaactaaaatgaacatagcagcttatagaaataaaatgtgttctatttatgtccttgccccagtaaggacaagaaatgcctctgtgacatccacaggctcccttctttataaattgtctactttgtcttctgcctggaggccatgtctaaggaaaagaaaggcagcaaagtttttaccaacaaaacaggctctggggctcaggtttcagagcccactgagtgtagttccaggtctgctctccaaaggggacagaaccccttgtgactccagccacaacacagtccctggaggaattatgcactaatgtaatatttgcttggctcctaggaactcttactgagaaagcaagcaagcattcaatatgagaacacaatcaaataaggaagatttcacttaacactacgtcctacaagataacaaatccaggaaaagtattaattgaaagggtagcaagttatataagatgatgcagaatgtagctgggctttttaattttactatctcttttcactgctaaacatctgataacaccatgttttaataaaattactttgtagcatatttacatttgtcagaacctgtttcttatcatatcctatagataagtgttcctctgtttgcattatgggaaacttctatttggcaaggtgaacagatgatcacgatcatcttttgagaagtattcagctaatgtctgcttgttgcctcacacctatgggaaatctaaaattgtgatatttcacagaatttaagggagagattgttaaaacacagattcctggccacaccccagtgattcagagtcagtaggtgaggagcccatgaatttgcatctctatcaagctcccagatgaaggaaagggatcctcactttgagtagccctgccctgaacaaagttacatcttgagtagttggtgatgcctgtggtacaaggtcgaaaaaggaggctctcctggtcccatgcatggggcttttttgaaacccacaacgtttacccaaacccagctacgaaatgactccctggaggcaggaagagaatgttgcctggtctcaggaatgttgggtcatggggaacaagtccctataagacaccagcagactattttaaactctgtgtctagggttacattcaagtcgtaacatataccaaccatctcattctctattcaatatccgcctgtcagccatttagtcaaataaaaccttttaggaaagaatacagctttgagctgcaaaaagctgctatcctactgggaggggtcaccctacgctaatgttttccagggcttatattgaaagtgtgtaaatatttgtaattaaattgaaccatgtagctgtccttcccatgtgatgttattgggtagctgtgaccaccagagtgttatagcaacatgagacatatttactgaaaatcataatggctttcaataactgaagtactactttgttttgtgggggatgtcaaaaattagagccaaaaacagagacagaaacttaaaaagctcattccagacttttaggacaatgacaaaatagtgaaaaaatcttgaaactttataatttagttctccatgctattcatcaagagttccagtattgagggctaaatgatctacttgatcaacaattcattctggttaacagccaaaaaatggctcttgttttcaattcttagcaaaactgtctgatacaaatcttccgttctcccatttggatagggactcataaaaggtgtgaagtgtcaacattaattctacaaatctactgggctgctcctgacagaatggtcagaaaagatcccagaagttctcaacagagaatttcaagtttttgatggttgagaaaaaaaaaaaaaaatgtatatttgagtttagcttctttttgaagttcatcatctatatcaattcatctgacatttatcttttttcttttcttttctttttttttttttttttagacagagtattactttgtcactcaggctggagtgccgtggtacgatctcggctcactgcaatctccaccttccaggttgcagtgattctcgtgcctcagcctcctgagtagctggaactacaggcatgcatcaccatgctcagctaatttttttgtatttttagtagagacaaggtttcactatgttggccaaactggtctcaaactcctgacctcaagtgttctgcctgcttcagcctcccaaagtgaaacattgatactcttatcacaaaattacagggcctgttctaagaaggcagtacattcatttaacactacagaatatgctaagtagttttccttagagcataagcatataaagtatcactagtgtcatttcagagtagacaaatatgtttgactctaataccacaggctaacctaacgcaacagaagtttaaaaggagaaagttatctttagctttgcttttcctgatcccactgtttttcaaagaaaaataaatatcatcttccaggcctgatgctgtattaactgaatgtgcaatccaaacacacagaaggacatctctgcttctgggtgggctctttcctgtgttacaggcccgtttagaatcaggtggtgattattaagaatccctgcccttgaaatatctgtacacaaaaaactgtagaacactgatgaaattaaagaatatctaaataaatggaaggatattcggtgttcatggattgaaataattcatattggtaaaatgttcattctaccctgcacaatctatagattcaaaattttgcatcaaaattctatcaaaattccaatggcaatttttaacatcagaagtagaaaaagcagtgttaaaattcatatgaaaccacaaagaccctgaatagccaaaccgattttgagcaagaacaagaaggctggaggcaccatacttcccaatttaaaattatattacaaagctatagtaatcaaaacagcatggcactggcataaaaatagacacataagtgggtaactatgtgagatgaagtatatattaatttgcttcactattgtaatcattttatcatctatacatctcttgtaacatgttgcatattttaaatacacacaagaatttttttttaaaatggattggaagtcatactccacctccttaagggtagagtagccatataaaaaattgttgagaattcttcttcacaggaaaataaaataaacatagaccaattgaacagaataaaaaaccaagacataaaccccacacatatacagtcaaataattgttgacaagggcagcaagaatacaaaaaggggaatgaacagcctcttcaataaacagtgatgggaaaactgaatattcacatgtaaaataataaaattgggcccttctcttacaccacacacaaaaatcaacttaaaatggattaaagacttaaatgtaacacttgaagatgtaaaactcctagaagaacacagagaaaaaattctttgacattggtcttggcagtaaatttttggatatagcacccaaagcataggaaacagaagcaaaaataaacaaatgggactacatcaaattaaaatgcttctgcatagcaaaggaaacaattaacaaaatgaaaagacaacctatggaatagtagaacatatttgcaaatcttgtatctgataaggtgttaatatccaaaatctataacaaactcatacaactcaatagcaaataaaataaaacaaatacctaatttaaatgggcacaggaaggatctgaacagatatatctccacagaagacaaacaaatggccaactatattaaaaggcacctgacatctctaatcatcagagaaaagcaaatcaaaatcacaatgagatatcacctcatgactgttagaatggttattatcaaaaagacaacaaataataagtgttggtaaagatatggagaaaatgggactctggtacactatttatgggaaggtaaattagtacatccattatggaaaacagtatggaaagttctcaagaaattaaaaatagaattatgtggtccagtaatcccacttctaggtatttatcccaagaaattcaaatcaggatgttgaagagacacttgtgctcccttgttcactgtggcattacacataatagccaagaaacggaaacaacttaaatgcccatgaacaggaaaatggattttaaactgtggtgtatatgcataatgaaatattttcagccttaaaaaaagaaacaaatcctgctatttgcaacaacatggatgaatctagaggacattatgctaagtgaaataagccagagacagaaatacaaatactgtatgatctcacctatacgtgaaatctaaaataggcataatcatggaagcagaaggtagaatgctgattgcctggggctgaggggaaggggaaatggggaagcaatggttagagggttcaaagttttacttatacaagataaataggttctgtagatctactatatagcatagtacctatagttaacaatactatattgtaccaagacggtagaactcagtgttcttatcacacatacacacatgcacacacatgaaattataataagaggggcagggtgagaggaaactttgggaggtgatggatatgcctacagctttaatggtggcagtggcttcacaggtgtatacttatccccaaattcactgagttgtacacattaaatatgtatagcttcttacatgtcaaccattctgcaaaaaagtagtttttaaaaaacctaacttatcctaactgatacagacacatatcaaaaataaaccaataagctgttaaatgaaaaacaaaacaaaaaaaaacaatcttgaagcccaactctcatctgatgactaaaccgtgcagattaagcaacagaatgaagttggtcccaataagactgatgttttagcaaatatgacaggagtgaattgagttgcaaaactgcaggaaaaatggaacaaacagtattttcccgttttttttattttgaaacatttcaaactgaagaaaagttgcaagagtggaagaattaatgcccagacaaccttcacctagattcttcaaagattaacattttgccacatttgctttctctgtatgtgtgtatattgtgtttatacgtacatataattacacatatacttaaacacacatacacatataaatatatgcgtatcctttttttctgaatcacctgaatgtacctgcaggtatgacacttcaccactaatcaacacatttctcataagacaaacccattctcctgtataactatgacatactaattgcatttgggaaatttaacattgatacaatattattatcaaatatatagtctataatcaaaatctccaccttaaaccaataatgtcctttatagtttcattttccaggatctgaaccagaatcacacactgcatttagtcatcattcttgatctcctttcatcaaggacactgtgttggcttccatgacattgacattttaaaagagtacagctgagatttttcaagacagctctaaattaggatttgcctgagttttttcttaagattatgttcatagttaacagttttggtaggcatactgtgtagataccattaggtccctttctcagtgtatcgtatggggcacatggttttagtttgccccattattggcaatattaaatttgatcaattggaagaggcaatatctgccaaatctctccattttaatgctaccttttcccctttgtaagtaataaatgtgggtatatcactttgaagcctatgcaaatattctcttgctcagcaccctttagcccagtggttttagcgtctgttgatgattcttacctacatcaattattactacggtgatggtaaaataagcattatggctgaaggcattacctatactggagattatagtccaatataaaagccaattaactcatatatagaaaagagtcttcattaggattgatcttgttattgcttaagaaacagtttcttctattttctgagataatgcattactggtggataacttcgagtacagttgtggttatttttctagagtaactggatatatgttagggtggaaatgcatagaactaaatatttttaaaggcccattttaggatctttaaaaaataacagatggttctgagtggatggtctctgtggcagagacatttacagtacatcatatacccacagatttaccaattgtccttgcagttgggagggacccagtacctagctttaggcaatgacctatgagtggaattgataaatcacttttgcactgaaggtattacaagcacatgtataaccctcacctgtctcctttgctccagcggtgaccatggagactgagtattgaaataatgagccataacatgatgctgtccgggttgctaaatcattgcatgaagaatagctgcactggagagtttcttgacctgtagtggagtttgcatgagtgaaaaacaaactcctatgggtgaaatgctagaatttggggattttttttaaccacagtataaatctagcctatcctaatagtatctaaaagccagttttcattttcaccaataatctaaaatttataataatcatctttgggttaggatagtagtttattaatttattcatagtagtaactcaataattggtgcaaaaatactgattgcctatggaacaacatttcctatccctccctagcctccattttttttttctggcagagccaaattccaattataaaaagtgaaaatgttagctattttctgtggcattctggagctggctaacactaattctatgagagctgtttttgcaaggtggttgatataacactggtagcttaaaactggccatgatgggagtattcacaccaagaaactgcagatgctgcaaatcaaccctcctcccatcaagccgccctctccctgcttctccctgcccaaccctcctgctaagagctagttgttgaacatttaacagcacattcttagatattttctttcccaggttctactgcaaataggaagggcatgtgacctaatgttgcccaagaagacttgagaggaaattagatacaggacttcaaaaagtcaaaagaaatgtgtatatatgatcaccaagagacatgcactagaatgctcactgcagcactactcataaccccaaactggttactgtttaaaatgataaccaagtagaatgggctgggcgtggtggctcacgcctgtaatcccagcactttgggaggcccaggcaggcagatcacgaggtcaagagatcaagaccatcctggccaaaatggtgaaaccccgtttctactaaaaatacaaaatttagctgggtgtggtggtgcgagcacgtagtcccagctactcgggaggctggggcagaagaatcacttgaacccggaaggcagaggttgcagtgagctgagattgcgccactatactccagcctggcgacagagcaagactccatctcaaaaaggaaaaaaaaagaaaaaaatatatatatatgttctaattgaatatatatatattctaattgaatatatatatattctacttgaatatatatatattctacttacttgaatatatatattctacttacttgaatatatatatatattcaagcagaatatatatgtatatatatattcaagcagaatatatatgtatatatatattcaagcagaatatatatgtatatatatattcaagcagaatatatatgtatatatatattcaagcagaatatatatatatatatattcaagcagaatatatatatatatatatatatatatattttcaagcagaatggacaatggaatactatggagtaataaaaataatttacacacaaaaatggctgtgaatcccacaaacataatgagtaaaagaagccaacatgagacagtacatagtgtgaagttccatttaaagttcaaaaggttaaaataggtgaaactaatctaagatgttagaaacttaaaatcatgcaactaattacatttggagaaggtagtgattgaaaaggggcatatgggagacttcttaggtactaatgatattctgctttttgatttgaatgctggatgcattcagttgtgaaaacatatcaagctatatatgcctaacaatatgtgcacaattcttcattaaaatgtttttttttttaagagagagaagagacaagagagaaaagagacaaactttgttttccttccaacattaggatatgctcccacaagatgctgatgcctgaccatggcccccacgttcggccaaaatacacagacctgagggtatatattgacagactgcggggagctggattcttggcagcaaggctgaaccactgcaccaatcttgggaccccttccagaattcattttaataaggatgatttttatcaggccacatgcagttatgtcatcaaaattactcattttgattttggatacaggcagcctttgatattgcatggaggaaaattttgaaagatgagatcataaaggagaataattaacctatttaagtgaataatgttcaatcctggatcaaataatcaatgaacttatcctcatcattctatttattaaatcaggtccgctaaggtccactcacctgtctgcttaaatgtcacctcctcattaaaagcagagttcctcacccagccacatgggttccttctattgccttcctttgttttagcacatctatgtgtctgaaattctattatttgtctatgtttcttttctaggacataggctctgtaagagtagagacctttcccatttcatttaatgtggcctctctagtatctaaaactgagcctagcagagtgggcaatccataaaagtgcccatttccaggcaatatttaagctttctgtagagtacctcttggatagtttggggttaccaccttctctggttcttcagtcacccccttgcctccctctgcttcttgctgccacattcagcccatgcaggtcagtggtattgggggtttgtccccttctccttgtacctgggattctaggggatattttttcaactagttttgttctaaacacttccatgataacaacgacatggaatcaacctaggtgcccatcaatggtggactggataaagaaaatgtggtacatctgcaccagggaatactatgcaaccataaaaaaagaatgaaatcatgtctttgcagcagcatgaatgcagctgcaggccattaccctaagtgacttaatgtttaaaagatacagttagggaagcatagtccttgatcttttaaaatcctcttatagaaacagggcaattagacaccaaaactgaaaacctatggacaacttttatttttttaatttttgattactatgggcacgtaatagtaatataatctttaattctttttttcttcctgtttaagttataccagggtcttcacttttttttaatctaatttcaacttttattttagacacaggggtacacgtgcagggtttagaaaaccaaatctcacactttctcataagtgggagctaaacatcgagcacacatggacataaacataggaacgatagacactgtagactatagatgggggagggagggaggaggctgtgggttgaaaaaccacctattgggtactatgcccatacctgctgcaatatactcatggaacaaacctgtatatgtaccccctgtatctataataaaagttgaaattagaaagaataaataaaaagtaaaggggccaggcgcggtggctcacacctgtaatcccagcactttgggaggccaaggtgggtggatcacttgagatgaggagttctcaaccagcctggccaacatggcataaccctgtctctactaaaaatacaaaaattatacgggtatggtggcgcgcggctgtagtcccagctactgggaaggctgaggcaagagaatcgcttgaatccaggcggctgaggttgcagtgaaccaagttcacaccactgcactccagcctgggcaacagagcaacagagcgagactccatcgcaaaaaaaaaaaaaaaaaaaagggaaagaaagaaaaaaaaaaaaccataaagaaaactggactctggcctaacttaaacaagaagggagggaaaaaaagaatgaaagaatatatgactattatgttcccatagtaattaaaaattaaaaaataaaagcccataagttttcagttttgctatctaattgccccgttcatttctttaaaaggattttaaaagatcaaggactatgcctccctaactgtatcttttaaacaatttcaaaacaatataatgacaagcatccctttaacacagtgagaacacagagttctaacttactaggccgaacttctgactaatcaaaagtacagcacagcaaatctagtgcaattaatatctgttagagatgtgaaaatacagacatatgggggcatgacttggcccacagcataaacaaattgacattgaagcaggacatatttccagctgtgtggagatgaagctgtcttctctcctaatcagtatagcgaatattatctgttaattctgcccatggataaaatatgccattgatacacaaggcaggggttctaatagttcctctacatccctgccagtctgcataactacacaggtgtctctgtgacatgctctaccctttagctatccatgctaaaaatacttctttgcaaaaattgccatagggcgatgactttgactttgatataatttatcatgtggctatcactttcccccatcttttttactttcaatgatgctctgaactcttcccctcaaaattgaatctgacaattgcaaactaaagagatttaaaagaacaaatggtcttccagcttcccttcaagcccggttagacagacttaatatacctttagctcagctatgggctagagagcacatctaaggtagagagcaaattgaaatgctccaacaaaggtgatgggatggaatggcttcaccttttctctaaatatttggctgcttttcctcttcttttaatcagtgttaaaccaccaaccagccattctccatctgatatgacctctggcattgaaatgaaatatttatagagaaaggagctctttaaaaactaaatatggtacaaagaaattagctagtagaagaatatagaactaggagaatgtgtgatgttatcctgcagaaatgtgagaataattcttttgaggagttttttctaaagggcagtagaaaagtagggtggtagctggagaggcctagagtcaaaagagtttcttttttagatggggaaaaaatagagcttatgtgtatgacacagaaaggccaacagataatgcaggagagggggaagagttgccagagtgatgtccttgggcaggcgaaagaggacggtcgacttcctaagaggagggcttggactctgcaggaagcacaggcagttcattctaagaaaaagaaatgtaggcagagaacatgagcgcagatgagtgcagatgtgcggttgacagtgcgatgatggggacatggggatgtctcattctgatggcttctattttcttaaagaaacaagaaacaagaaaatcagctgaaggtgaaaatgagggagaagataaggtataaaatggttacctaaaagaacaggagagtaaaggggctccagaaacataatctgactactcggcagctctaaggacccatgcgtggtttgtagtcatggctgtaaagtgaaacgagccagcacaatggtgtgtttcactccatctgtgtttagctgggtgagtgtaggcaagatgggcatgaagagttgaatgtaatctgggttagacttttgccaagtgattacaaaggaaggggaaaggagcaatgtgtgcctagaaaatgcaagacagtaattagagtaatgcagagtaaaatgtgagctgaaacagtagaaaattgggacatgaagagagtgagagacaacagaaagggggtaggatgcatggacttcaggtcacagtggggttgaagaatcgttggagttgaggccctaaaggaaatatgagccctcaagaagttatcctcagtgccaagttggacatcaagttgtcaaggatagataaacagcaaagatagttactctattgttcatggctgccatagggacaaacaactcagatagagctgtcttaaggaaaaaactgtccagcaagaaagattagaaaaggacagaggagactcctgggtataaacgtaagagaacatgaatataagaaagcaagatgtcacaacaagaaaaaacatccttgaaacaagacttcttatagcagccatagcaatgaccaatcttcataaaacttgtgggaaagctcctataatttatctagtcaaacccattttacagacgagtaactaagacccaaagaggtgggaggatctgcttaaaagccacatagccctaacagagataagatattttgactcactttttgatagagaacattattgtctttatgtaggctgaactatatgaaattgacctattatatgtcaaaaatggttgaatcttgccaacttcatgtcattcaacctaacatactccagttttctttctactatagcggagtgtcaagaaagagcagatctataatttaaaaaaatttttttttttttctgagatagggtcttgctctgtcacccaggctagaatgcactggtgtaatcactgctcactgcagcctcaaactcctgggctcaagggaccctcccactcagcctcccaaggagctgggactacaggtgtgtgccaccacattcagtcaattttttaattttttttttttttttttgtagaaatgggcgtttcactcttttgtccaggctggtcttgaactcctggcctcaagtaatcctcctgtatcagcctctcaaagtgctggtattacaggcatgagccaccacacttggcctaatgaattcaaatatttttaaaataaactattgccatcaaggaacagtggctcatgcctgtaatatcaacactttgggagtccgggggagggcggatcacttgagcaggagtttgagaccagcctgcccaacatggcaaaactctatctccacaaaaaatacaaaaattagccaggtgtgctggtacatgcccatggtcccagctactcaggaggctgaggtgggaggattacttgaacccgagaggccgaagatacagtgaacagagatcgcaccactgcattccagcctgggtgacatagtgagaccctatctcaaaacaataaaaaacaaaaataaattattacccacttcttgtactcactttcttattttatcaagaaaatgtctgcaggcagctatgggagttaacagcaacaaatttccgaaaactaaggttaaatttaacctctagtgaagaaatgataaagaatccaaaggtaatggatgagagcagccacctggagctatgaccaagagattagtggtgaccctcagaactaaaataagatgagctgggggaggtataattggatgattataaatataattcttacagataagaaagtgcactattaggagaaggatgatcagcaaggtgtctataaaaagaaaaaacagagtcaaatccaagaaagagggttttgcaggagtctctagaccatccctgtgaaggaatatccccgctaggggatgtatgccattggtcagaggtcaatgacaccagccaggaagctcatgtcaccggctctaaacgccccagtctccttgtgaagataatctggcttcccatttggttatgaccataaagaagctgccactgtcaaagcacacatagttggaatttctggtggttgtatttctcatagaatattaatagatcagcatgattgcttttcatgcattactccctgtgtttggtggatgtggttaatgtgaatttacatttgcgaaataatgaagtagatgttgtcagtgccatgcatatcccctgggtcctccagcagagactttcctcctatttcaaggcatccctattcttcttggcccaatagtcaggcagaatgttcagggaaggctggatgtgtcagggagttaacactccaggagtgaccctcaaccaatgaagggcacatgttggttgaaaaatattccaacttcctcacccctccatgggaaactgaggcattgtctctccttgaaggttttcaggagatctgcttttgaggaaactcaaactaagagagataaatcctcatgatgagaagtcaaacttctcactcttcaaaatcaaaccagggctatgatgaattcaacagggtgtagaaggccatccaagaagatctctctggaagacaagctggctttgcctaaagaagtacaacatgtcccaaagctcatgcaagtgtaccatctccacttgaataatcacagaaagagaagtggcttttgcttgcattggttctctttaagttcttttttttaattatcattatactttaagttctagggtacatgtgcacaatgtgcaggtttgttacatatgtatacatgtgccatgttgatgtgctgcacccattaactcatcatttatattaggtatatctcctaatgctatccctcccccttcccccgaccccacgacaggccctggtgtgtgatgttccccttcctgtgtccaagtgttctcattgttcaattcttagacagtgcatgagtttggtaaatttcacttctatttttctggaagtcacccttcttataactagttcataagtgaaaaaggaaagcccaaagccaagttacacattgacttgatgtggctaggaagtatatgagaaagagaagagaaagaaaagaagataaaagcacaggacaagtgggggcagagagtggtaaaaagtcaagtccgtaggcatcagagtagatgttcgcataatagacggcagagctggagccttggcataactatggctaagtgccttgtatattttattatttaattctcacaacaacactacaaggttgttactgtagttgtcccattttgcaggtgaagaaaacaaggcttgaggtgagtctaaggtaaagtactggtcagcagcagagttacgatgtgtgctcaggcagtctgagtcctgagttcatgctttgcagtaactgttccctattgctgttttctcatactggacagagcactggacagtgagggaaacttatgtttcaaaaggttatatttcagaacaagggccagaatgaggaggagatgggagatccacaaagcaaagcaggatatggggtcagacccgcttactatggtaaatgctttcttacatcgccatggtaagaaagtgtcaatctgggactacctagggtgctgaagacctgatgcagttgaacacttcattcagtgtgacacctcactccatgggaacactccctactgaaagagcttgggggaaaggaggaacagatacagtcccaacacttctcttctgaaagtaaagaatgaaagctatgattggagaaaacacgaacatgcacaaaactgtgatagagcaaattgtggatactcgctcacacctaccagaatgcctaacagtgaaaacacagccattaccatccctggagttggggagccgctggacttttcatacattgctgatgggagtataaaaatagaacaaccaattttttaaagcttggctttttcttataaaattaagcatcagctttattatctagcaattatattcttcagtattgatcccaaagaaaaaatgtacaggattattcatggcagctttattcatgatagctaaaaattggatataatccacatgttcttcatcagatgaatgaataaacaaactctgatatagtcatacattgggatactactcagcaaagcaaaaaagaactactcactagaggagctgacggacgaccaaggtgggcagatcacgaggtcaggagatcgagaccatcctggctaacatggtgaaaccccgtctctactaacaaattaaaaaaaaaagaaagaaaaatagccaggtgtgatggtgggcgcctgtagtcccagctactcgggaggttgaggcaggagaatagcgtgaacccaggaggcggagcttgcagtgagccaagatggcgccaccgcactccagcctgggcggcagagcgagactcggtcaaaaaaacaaacgaacgaacaaacaaaaaactactcacatacaacaatggatctcagaggcatatactaataagcacagcagtatgtactttctagaagaggctatactaactaaagatgacaaaagtcagatcagtggttacattgggggtggtagcaaatgactggaaagagacataaggatcattttagagtgatagaaatgttctatcttggttggggtgtgggttatacatatttatatatgtgtcatagggctataaaatttagatctatgcctttcactgaatgtaaattacacctgattttttaaggggaaaaaaaagagctgcgtcggtagactcactcataatgataccaagtttcagggcagcttggtaaattcttcgctcagtttctgattcaacaaaagctgtttagcagtactgttcattccacccacagggtcccatggcctcatttccctccacaaaataatttcccaaattcattctgtctgctgtcattttccacaagaaaaaatggtgcaactacagatgagccttgtgactttccttcaagtactaaatattatcacagttttattttttattttatttttatttttgtgggtacacagtaggtatgttctacaaaagaccctcattttcaattagcagcaaagggcaaatgtattaatgcaccttaaccaaggtaattattacaatcatatgctttttactagtagatcaaagcacaaaaagcataaatcttgaacaagtatgtatctatttatggggtaacatacttttcttttagacagaatagtgaatctaaattgcagttgtacctcttatgctaaggaatcttccttccaattggcccatttgttaatttcccctccatagggacatattagaattctcttgggaagatctaatagaaattatgcactaatgaaaaaattctttaaatctaagataaattgatttttcttcgacatgtaaataattgaacatatgattaattcattatgagaaagttaaatagaaaattttggtatcatgtagtaaagaaatagtgattcttgaaagttttggggaaagtgaaaagatggaaaaaatcagagaaactagaatttgaatgcttatcttgtgctgaatgcttgaagaagtgctttatatatgcaatttcattaatcctcatagcattcttgtgaagcaggaatatagcacaggtgacagatgaggaaactgaggctcatagaaactaatatgtccaaagttcagaactagtaaaaggtagagtcagaatttcataccaggtctagataactccatagtctatatctttgctgcccaagagtaagagacattcatctattgactcattaaacagatgtttatcaaagtgcctgctgttctaagcactaatgatgtaagtgtaagcagtaacccattccttgcactgtgggagcttatattctaatggggagtatggtggctttaagttatatccacaaattatatgatgctcctgttttcactaagtagaacttaatttccctcctcctaggtgtgaactggacttagtgacttgttggttacaaacagaataagtcagaagtggtatatcatttctaggaatggtctaacacatgtgactttctcttggatcacttgtgatggggaaatcagcagccatgttgtaagtacactcaagcagccctatggagaggcccatgaagtgaggcactgagacctcctgtcaagacccatgtgaatgagcctaaaagcagacctcccaccaacccccaagccccagttaaatcttcagatgagaccgtagccatgatcaatccttgactacaacctcataagagaacttgagccagagacacccagctaagttgctcttgaatttctgatccatagaaactatgggataagaaatgcttttgaggccaagaaacatggtggtaatttgctacatagcaattaaatagataaataaagatatattcactatgagctaattatatgagatgtgccaggaagaaaacaaaggattgaaagaaatggaaaggtattagtgcaattttaggtatgagaaggcatctctgagaatttaacatttcacttgaagccagctaccgtgtctcatccctgtagttccagccactcaggaggctaggctgagatgggaggattgcttgagctcaggagttcaagaacatttcactcgagatataaaggatgagaaaagagaactgtgcattggatggcagcatggaggtagatagctggttcctttggtaagactggtgatatggtttggctgtgtccccacccaaatctcctcttgaattgtactcccacaatccccacatgttgtgggaagaacccggtgggaggtaattgaatcaagggggcaggtttttccagtgctgctctatgatagtgaataagtctcacaagatctgatggtttaatacagggcagttcccctggcaggcaatgccagcatgtaagatgtgactttgctcctcattcactttccaccatgattatgaggcctccccagccatgtggaactgtgagtcaataaaatctctttcctttataaattacccagtcatgagtatgtctctattagaagcataagaagagacttatacaactacctatagcagggcggtagaaatcaaggaccaattagagtaaaagaaagaataactaaagagaaataaggaagatcattatatacatatatttttttgaaatattagctagaaaggagaacaaaactagtggggaatctagcatgggctatgccagggtcatcgatgaggacagtggtgctcctgctcttttatgcatgtgtgaggatgggaaaaatcccattaaaaaggggagaatgaacaaggtgaggatgtgcaaacagaggcacaaattagggattagacaagaatgatatttcctgcatcacaagaagggatggtataggctaagcacttgggtgggtttacgtgaagctctatgggcatgagaatgaggaaatgcctggctggtactcttataagtagaatacagttcccttcacaaatgtgttctagtgtttaattatttaactattagttaaaatattaaccaaaagaacactacttgtgtttattgttatttttaattcattgatttgggtcttgagtcttcacaatatctcccatgttcgtgtgtataacttctccgtgatgaagagtaagttctccaatgctatattttaatatttttacatttagaggtttttatgttgttgttgttttaaggataggatctcactctgttgctcaggctggagtgtaattgcatgattacaactcattgtagcctcaaacccctgggctcaagtgattctctcacctcggcctcccatgtggctaggactacaggtgcacatcaccatgcctggctaattttttaattgtttgtagagactgggtctcatcgtattacccacactggtctcagactcctggcatcaaccaatccacctacattggcctcccaaaggactgggattacaggtgtgagtcaccacgacaggccaatactttgggagattttagattacatttagctccttaacctaacttttatggtggtatatagaatgaggcagtgagttgtcccatttgatagttcaccctctccatagtaattggaaatgctactgatcctaagttttcatataaacatgagttgattcctggactaccaattctttccagtgatatgttggtctattcctgtggctagaccatactctttttctatgcccttttcacccacagaaaagggtgctcagtatacatgcatagtttaataaataattataaagtgaactctcaggaaaccgcaacgtaagttgaggtagagaacattttgagcccctctaaaccctcagaatatccattcccatgtaaaacctcttgcccttccctacacgtaatctttcttctggcctttgggatagttattttcttgttcctttacttttctaggtattatgatgattatttttcctttactgatggagctctcagatttagcgtctctttttttcatgaaatgaacagtgcctagtacagcatcctcaggaatagagaaaaatattcaaatggacaagatatggctttcttttacattggcagctatcactgatatttatcaatataactgtttagcatttgacaaaggaaacctcttctttttagagtattaaatatttattgactatgtatctaagtgggttccattactatctaaattctaaattttaggaacagaactgggtaggcctgggagaaagctgtgcatggctcttcatgaatttactgctgatataatggacatttgtctaatatatatatatatctaaaatataattaaatttatagttcacttttaaaattatgacagtacattctgaaatctgggctagactttttcagtatcgttctttttttcacatttttcttggctttttttctgaggagttttttttcagatacatcctagcatcagatttgatgcttcataaaattatattagcattttggttgatactacattaaattaactgattataaattttctgtcagtttctaagaacttggcactagttggggaggaagggagatagagagctcagtagccatctttacataattccttctaattatgtttatactatatttaatactataggcaaaattaattatagccccttagaactattattacaactcaacttaaaacacttaatagcattgttagtagaagattttctactaaaggcccttgtttccaattagcagcaaagggcaaatatattaatgcaacttaaccaagataattgttacaatcatatgctttttactaatagatcaaagcacaaaaagcataaatcttgaacaaattatgtataataatgatttgtaccccatatcaattctaatacacgtatcctatagtaaaatgcatgctttaccatatttaagctaggctcccaactctcaataacaacatttctttaaaaaatctcccatgaagctattgacatcaccagacacattttctgcatgctttggagactaggggtccaaggaccaaaaataacttttctagatttgtggtaagaaggtagctctaagtgagcttttattagcatggggcaaaattagataaaaaatacacaataaataacacttctagaacccttttcacctctggtttatttctgtgaaagactaaatcagaggaagaaaatgatagctaaaatcagaaataaatatgacataatagggtgcaatttggaaagttaggccaaaatttaccaaggaaaaaatgtctcatcttttgcttcttgagctttgatttttcaaagcaaagtttattcattcttttactaactccatttctagtttgaatctaaaatcatattttcttaatcaaaagcaaaatgttatccatgtcttggaagatgctgagatgtttataccatgcacatcatcatcccaataagactaggcatataccatcaatatatctatttttatttaaaaatgtatacatgtattatgactaatcaagattttaaatgtaagatttctatactcatagaaatatatatataaatacataaaacaatacatcttagttattttcctcccatacccattttctcatatagtacacaccccccttggaagctgctactctaaaccattcaaacattgaatagtagtttgctatgagtaaatcttttcacatggtataaccatttgaatgttaagtagacagagatttaacttgctttgagtgtgttctatattcatgtcataaacttcaaaatttataattatacataagttattattttatcctctcatatatcatcaaaactctaatgtgctagtacctttacttatctaggtattatgatgattatttttcctttactgacagaggtctcagattgaatgtctctttatttcatgaaataaacagtgcctaatacagcatcctcaggaatagagaaaaatattcaaatggataatatatggtttcttttatattggcagctatcactgatatttatcaatacaactgtatagcatttgacaaatgaagcctcttctttttagagtattaaatcttaattgactatacatctaatgggttccatcactgcctcaattgtagattttaggaacagaattgggtaggcctgagagaaaggtatgcataattgttcatgaatttactgctgataggatggaccatttgtctaaaataaggtataaagaaatggagaaattttaggaaagcttatgtgggtcaggtctcaatgtgacagctcacccatagaaggccactgtgagaaaggtaagttaaaaggatgttgtgtttgcctggtctggagcctggagaggcgaataagataagaagatatcacacaccatatttgtgtaaactgggatgctgtggttaactagtattaagaccagacatcttttcccacactgagactctaatatccagcagccttctagacatcacttggagcactcgcctgtctaacagacaactcaaactcagcatgcctaaacctgaattcctgatcttccctcctgagctaacttcacccacagctgtctccattgaggggatggcaacttcttccttttagttctcgtgccaagaaccttggcactatccttgacccctttcccctctcccgtaccaacatcccatgcctcagggaatcctgttggctctatcttcataaaatatccagattccaactgcttctcacttcctccactgttaacatctgtcctgagccaccacccactctctcctgcatcaatataaatgtattggaacaggtctcttagtttctcccctttcccctatatagtttgtgctcagcgcagcagtccgaataatttttaagtgaatcaagtcatttcaactttctgctcagaactctgctttgcccctacatgtccctcagagtaaaatctgtctttgcaataaccttcagagccttatatgatctactccccacctccctttctctctctgacattgtctctattacctccccttgttccagccacagtggcttcctgacatgttccttgggtgccaggtgcacttgtgttttgcactgtcatctattccatcttcctggaacattcttcccccagatatctacatgttccctccctcagctctttctagtctttcttgaatctcatgtccttaataatgatgcccacctgggccatcctgtttattactgcaaacccctcccaccactatactccaacccagcccatccaacgattcttacctgttctcatttatgtaagagcttattacctacaaaaataatactcttcactggatccaataagccatcaactgtgagtcatgccagtatcttactacgacatgctattgattgtaaggtagattttgatgtcagggatattaaaatataaaaatatgtgtaccttggaatccgtgacatgtgggtggcaggcagtgtttatctgggagtatcattccttacctcctacacagggttaaaaccggatgacaggagaggggtccctgggtgctctgacttctgactccattctccctttcattcattaaactcgtcttttctgggaacttgctttgcatcaggcattgtagatacagtaatagaaaagaaaacagctcctgctcttaaaaggaactttcagtctagtaggaagtctgacaaagaatcagaaattgaattataatgtgttaactgctgtgatgactatagggtcccagaggaggccccacccaccaccatcgtcaaacattttcaaagctaaagagagagtaggcatggttgtctgctttttcttttcttttttctctttctttcttttttttttttctttttttttaagacggagtttcgctcttgttgcccaggctggagtgtaatggcatgatgtcggctcaccacaacctccatctcctaggttcaagcgattttcctgcttcagcctcccaagtagctaggattacaggcatatgccatgtgccaccataatcggctaattttgtatttttagtagagatggggtttctccatcttggtcaggctggtcttgaactcccgacctccggtgatgcacccaccctagcctcccaaagtgctgggattacaggagtgagccaccgcacccagccaagtttgtctactttttcttatttccaaactgtgaaaatggaaaacatcagagtactgacataagaggcaccaaataatgtatccaactaaagtattgctgcgtatctatctatttatcaatcaatcaagagaatcatttaaggtccagatagctgcttgcctcctacctgaagtatgaatttgaacaccagattctttttttccatttctgcctctaagcaccgtgtgatattctgaatttctgtttcatcattctaaccaaggaggcagggaactctaagaacttctctatctcaacatcttcgattctatttttgcttaaataaatctcaagaaggttaccttcaccctcaggaaaggtgtctgttttgtttctccgaggaagatatgttacggaacattgtgttcaaataatgtctagtgatatttattacacaggctaaaagtatgtgatactttaagtctaaattgtttaattctatgatcccatttataatttgcaatacaatgttgtaactctcagtaagttaagaaagaagagttagaaacagtggttgtctcatttaacatgatgttctcaaagattctgaaggccaaaacagctcttacctccccatttaatagatttaaccacgctaaaaatcttccatctgtaaaaattattttaactaacccaatttttgtattcatgccattcaatacattaatcaaattgtttaaaacagaatcttggcaagaaataaggtacatcaattaactacaattctaccatgagactgtaatttaagtctcatgaaatgttaaaaaaaataaaattaagtagcagatgccagtgtcctctgaataatctacaatgatataaccaaataatgggaatctcagaatagataaaataggtttttactggcttaaactttaattaaaaggactattcttgatgctctgtttgtacttctacaatattatgagggaacttgttcagcttccactgctaagatacaggattgccactgctgagatataggattgggaatgacagtagcttcaaagataagaggaagatgtcaaatgaattccattttgaatatatatatttgaataaattcagcttaagatattacccagatagaagcatccagcgaaagttggaaatacagctttgatgctcagggaagaggttggaactgcagacacagatttggtgataaacatttcagaggccccagtaagagccatggggctggatatgattatactgggagacagaaacctgaagataaaagcagagaaaaatcttctttgtaaatagtatttgtggattgaggacaagaagccaagatagaaatgttttgaatatacaagtaaaatgtagggttcagttggagaagccaagtcctatatcaggtgggaatgtatgagatccaagcctcaaattttgcaggaggtttgatagtattaatataggaacctcattgcaggaggaagggaagacatcagacatagatggatcgtattctctgtgaagtgaaaggcaggatcacatgcaaaaaacaagagaagaagtaaaaaaagaaaaaaaaaacaacacatgtagccacactgttgctttgaatttcgcagtctgccttacctaagctcttactctttgcaggcaaataaagaaataggtggataaagtgtgtatcaaattgaacaaaatggcagtttagtctcaaaggaagacatttcctttattttaatatagtacctcctttccaataatttcagtaagccgtcatattatactagattcaattcaattttcagtgtatcttttggcttttaaaagccaagatacaagttttaacttgtatcaagttaaaactttaatcaaatatcataacccctggctatttttctggtctatagcctatgctcatcgtaagaattcttgacattaatacattattttaggtaaggatgtagaatatttattccatagttatcatgcagatggaagtcatttttctccccaaaggtggcaaattagtattgactacattttattatacacattatcacttgccttagtatactcatttatgacgtgtatgattacaacaacaaaatgcaaacagaaacaaaaggtttggtgataagggacattgagcacagaattttaatgttatatttcaaaatggctatgatgaaatgtgctagctcaactgaaagaatcacagcacatctgttttgccaacttttcaagttaacaaattcttttccactctttgtatttccctctgagcgtatctccttggaaaattatcaagtctccaagtgaagataaagtggtatctctagatatggaaatgttgcaaaggtttcattttacagagaattgctcaaagatgaggatgacataagattaccatcttagaggggaaaaaaatgtctaaggcataggagaggaaagtatttgtatttgtgaagaccttctgctagtaactttgaaaaagttggcaaccaacaaaactttgattaatttcatcatgtgttgtcccttgcaagaatatgtccagtatgtcaaaacaaacaaataattgttaaagtggcatgtctgtagatgatgtcaaaattcccaaagggcaattttttgggcagcctcaaggtcagaaaagtagtgtcctagaatagactgacccacatatccttgaccctccccacctgcctatcagtcagacacccaaccaatcagaggcactgctctagggggcttcacgcttcccatctgtccatcttccattcttagtacataagcctttgtcctgatgcttgtcatgtcatggttgaaagacggctgacctgcttccgggaatcacagcctgattccagcaggatgaagacagcaaaaagcaaaagatgaaataattaaggggtatattcattgagtgtccctttttaagaggcttttccagaagcacattcaacaacttcacattcccatgcccagctggaagggaggctgggaagttgagtatttgagctttcaaggaagaagtaggctgtgaatgattttagggtacccagttcacagtatcttccatactggcccccaggaagtgctcaacaaacatttacatgtcgtggatgatttgtgtcctggctgtgacacacacatgccatgttcattctaacactggcctcatctcatcttgtaccttgcttccttgatccaggagagcaaacactttcccctttctcaaagccctactcactcttttaagaaaaaatttattaaaaatgcagtatagcacatgtacagaaaagttcataaaacctaagtgtacagcctgatcaattttgataaagtgaacacatcatttaagaagaaactgaaagttatcaaagccacagaagctcatgattttatgtcataccgttatttaaatatactctaagatacacctatataattgatatgtggataagaggacatggtaatctgttttatggataagtgaagactgttaaaatcgaactcttgggttttcaaaatacagaatgtgtttcaatacttttttagtcttgtataatccatcagactggacatttgaaaaatgtcacaaaagtttcctgttgagattctatcatgccatcagtaatatagctaaaggcaagtcctattaatcccagatgaatttaaactgcattgcactgtggattttaaatagatttaaaataggctaataggtacttgcaagggataaatttaagtatttctgaatcactcctcatgcagctgctgaagatggcaagaaaaaattattcttccttaaaattatatttaagcactagtaaggcaacagtgatggtttagctttagtaacaataatttaactaaagcacagtaaattcacatatactcttaccatgagcatgaagtgaaacattctgcagataagagaaataaagcatagaggggtcaagttacttgcctggtttcataaaggtagttagtgatcatgccctacttgtctcacttcttcctattgtccctctccctctttctattccagctccagtagtacccttactatcctcagaagcagcaaaacaatcccacctccaggtctttgcactggtggcaccctgtgcctggagtgcttgtctagatttccacatggttctcttgctctcacttctagcaaacctctgcttttaaattatatcccaatacagcttcagtcatccttaagcattccctgggcttcttattttatatttttagagtaggagagctaaagcatgggagtggtctcttgggtaagttaaactctctaagcctcagtttttcatctataaaatagaaaaactgacgcttactctgcatggctatgaaaaggatgtgtgtgtgtgtgtgtgtgtgtgtgtgtgtgtgtgtatgtgtatacatttacagtggtgtgctggtaaatgtttaactactggctttccaaaaaaaaattcttgatactgctaagtgcagatttgggaatagatatgcagtagacaccatggtacagtgtttccctcatacaggtgcaatagatataaataaccacacaatcacagataatagtaaaatgcagtaaaataatgaggaagtggtgacttttgagtgtttatttctttgttttataacaaaacttatttaattgtatgtttacataatttaattttaataatagctaaaaattagctgtctccagcccatgtgtctgtgtgtgttggggggggtatgtgtgagtacccatatacaattgaataaacaaaagctagtgctgttgatagggggaaaaagccacaatattttctttgttttctctaaacagaaacaaattaaagaaagcattgactttgttcaatgtgattttataccaatgatggtcatagatgactatagtaacagcttcaatgtaatgtgcagaaaatcctagacacattaaactaagaaatacacagacatctcaaccagggaagcacagcaaatgtatctccagtaacaaggcaagaacctatcattgatgagtgtttggtcacactagatgcctggtctctttattgatacctcattctgacaggtttccaaagacttgtcagggcacatactcaagtcattacagatccagataagctttaaattgaggtcaggatgaaatccatccccgttaccacccagattctaaacagctaaccctcttcaactgtattaaattccaaagagggaatatgatgaaaagaggagagaagccctacagtgttagaactggaaggtaaaatctcttctataaaaggtattgtttggcagatgaagagcagagatacacctggttatcaccttgcaaaaaacagcatcacatacagtgccttgtctttttgtattttctggtcatatccaagccactgttgtactttcatgtttgtttaaactggatatgtggacacaattttatctataactctattggtcacagaaagaccctcttcctattcttcttgtcttggataacaaaggggttccaagattcagcttaatcctagagttttacccccacctccaagaagcagagagactagtatttaaacccaggggggtaaaacttaccttgagccaagcagctgggaacacagacatgttggtgaatttcaggtcttagagctttcaacaaccatcaaacacactaaggctatgcaggtgaataaagaccagtcactatccacaaagatgtctgggtttacttgcaaagatacaactattggaatatgggagtccctccctccactggaaggtgtgaagagggttcctagctgagctctatgggaagttctcagtatgccatttggggtaaatcaatcctttgtagaagtttgtactggctgccagaaaggcaagcccttggtgactcaagtacatctgaacatttctgtaagatctctaattggtgggttttctttcttctttaaaaaatactgtatgtagcagaagttatgtcttattcacaactcttggcttaagcaggtgtcattcttgtttcatcttacttccaaatctgaatttttcttggggacagatggctatcaaactgctctccctttcagaacacacaccagatgccctcgcaattcaaagtgaaaaactaggctcggctcttcaaggtgtcagcatttatactttaactttaaaaactcacttaaactctcaattatttcaatgaaaaaaaaagtttccattaagccattcttttctaatttttctaaaaacattgcttgtatacagtgtttactttttccattattaagagtcagtattagaggcgacctcaagagcactacaagctagacctatttcagaccaggaagggtccacaacacttaatggacattgctggttccagacctggatccttttccctggttccacatatgatggtctggggaagatgggaaagaccaggagtttgggggcagacaaactgtctcctgaatttcttgctgacattctaggagaagctgaaataaagcatcccttctcccttaacctccagtgatggttacaaagtcactcttgatcaccatatgggttggcatcagtcaaaaattgccccaggaatgataccaacaaaatgaagtggctcattttcccctaattctaaccacaggggattgcaaaaagatgctgatgcaggtcaggaaaggaggggcctttttacgcccaagctgcaagtaaatgaatgagcaaatgcttgaagacattgaggagggagctggcagaatttagtttaaggagcttcattctccagcatcatctaccccatttcccaaacagcttttccatgacagcccaaagagcctgctttatgcagaggcaaaggaagctgtacccctaaaacttcctctacgggtcctgctattgtgtttgaagttcctgcaatctactgctttatctcaagactttcagaatcaaggttacaatacaaaccttattggtgctgaagacacactatgccataattaaggtatagcatcttatgtaaacaaattaatcagatttgtttgcttgtcagagagcaaacagtataaaggggccccagaaaagttaaattttgagataacacatgaaaagaggaaaagaggggagagggaaaaccattccaaggcccaggggaatgcgaggatagaaagtttgggctggggacattacacaaaggtagaatgatctcttaaaaaaagccaacttataaagagttgaatttgatttttattattttagagacagggtctaactctgttgaccaggctgtagtacagtggcatggtcatagctcactgcagcatccaactcctgggctcaagtgatcctcccacctcaccctccttagtagctgggactacaggtgtacaacacaacacctaattttttattttttgtagacagggtatcttcaggtttcctaggttggtatcaaacttctggcctcaagtgatcttcccatctcggcctcccaaagtgctgggatggcaggtgtgagccactgcacccagttgaatttggttattttatactttgatcttgaataaaaagtgatgaaaggggaaaggtactaggcatttgtggagatatctcactctgtaccatacactcttgtaatgagatctggtcctcatcttccgtggcctctccacatcacggggaatgggtgttgggaatgggttacattccttggcttccatgaccttccttctcctgtttctgctcctacttcatagacatcagctttcagtccctgtttcatttgccttctccttacatggcagtaaagtccaatattcagcgtcatttctctcacctttctcttctcattgtgtagcatattcattcaccacctttagtcacaactcacatgtagacgacttagaaatgttaagttttaggctagatatcacctttaagccctgggcatacactccaaaatccctgcttcctggaaagacctagcagggtgtctttgggcacctcacagtccacatgtctgtctacaattgaactccttgtctgtcctcacaaatatgttccaccttctcttccatttgaagttgtaggaaaagacccaccactcacccagtcacccaaagcaggaccttgggcacaactttgattcctgcctttctgacaagtgccaacagggcaggtgtgtgccgtgtgccacatccacccctcacccgacaatgtctttactgcttgacctatataagacttccaagtgctggccccttcatctctctgatgacttttctctgaccactgagtccttcttttcccacctgtgcatcaggctggatttggacctgactctcaatgagagcagtaaataattcaggcactggtgattcaccaatccttttagaaaatatagctcaaaccaaactgctctattataattactttgcataaatctgctttatagctaaggccaatgggctggtgataaagcaaagaaggactcctttaaaaaggcatccggtgggtgacccatgagcctcatagaggcaacagtcccagggacacctccctgttgattgggtcacacctccagggcttcattcaaactgctgactccagctgaaatggcttcctcccaagtctttgcaagactttgtctttgagaactaaatccatgtgaaacctcatttatggaatttcttctgcctgtacctccttcacagatagaacaccctcttccctcctgatctgagaatttctgccatatcattgttcttatttattgcctgcctttctcccctaccagactgtaagcaccttgaggggtgactcaatgactattttgatcccccctgcatgcagtgcatgctatacttttttattaggcagataaataaataaatgagctaacaatgtaagaaaatgtttttaacatcttcacattagcaggggaaatcaatgaagatgtgttgaatatttaaaggatcattccaagtaaccatctctcactaaagaaaaacagaagcagaaagtcatacaatctaagataccatgtctaagggttgcgggagaagtttggtaatcatggtgagcaaatctctggccctggcctctagattaaaaacacattttatgtcaagaagtcataatcgttctacaacagagccaagagccaagtgcttttcagaagtgctgtttgcaggaattatactccccagtccatgacagtatcaggagttattttcacatgaggaaatatccaaaaattgccaggaactttttaagtgggacagtaacttatggcagacacatctctgaacacatctacaatttaattttcaagaaacttaagtggagacaatccttttgagaatatctaacaacagactccaaagaaagaagctcaaagaaaaatatttgaatagaaagctggagaatatattaccatttcagagatgactgatattccatttatattttactacatgttatggtagtattctccagcagcagaaagcaagactgagagattcctaggttacaggagatatatttaacctcggatcaagtggaagttggcacctggaatccttctaggaatgaagcaaggatatgactcaatcaatcaaacgttctggcagaaagcgaacaggcaggcagacaggcaggcaactgagatgatgctcgtttagagaaaagggactaagtcaagttcgctctactgcctcagcagaatactttgaaaacttaggtgggaaaggtttttttctaataactgatagcgactcatcaattgcacagcctaaccaggatgccatttttttcccatgtgggcagaagagtttatgtatcacatcaatacactggtcactccctctacctctcagttctttctttggagctgactttatccatttattcacccatcatttaagcatccacgctgcaaaagatactgtgctaacttcctggagatatgaactatattattgactttatgaatctcactgtttcatagcagaagtataaaacaaattggtaaacacatacatgttttaaaaagataaaattttgtaaatagtatcaatgtatgctgttacaaagtagcctactgggcagactacctataccaataggttacctataggttggtcagttaaggtggaaagagagctgactcagagtgttctagaattgtgaaacaagttccagagggagaaaaagacaagaattcatatcctttgcccactttttgatggggttgtttgaacagacctgtctcaaaagaaaacatttatgtggccaataaacatatgaaaaaaaaactcatcatcactgatcattagataaatgcaaatcaaaatcataataagatgccatctcatgccagtcagaatgatgattattaaaaagtcaggaaacaatagatgttggtgaggttatggagaaataggaacacttttacactgttgatgagtgtaaattagtccaaccattgtggaagacagtgtggcaattcctcaaagatctagaaccggaaataccatttgacccagaaatcccattactgagtatatacccaaaggattataaatcattttactataaagacacatgcacacatatgtttactgcagcactatttacaatagcaaagacttggaaccaatccagatgcccatcaaagatagactggataaagaaaatgtggcacatatacaccatggaatactatgcagccataaaaatgaataagatcatgtcctttgcagggacatggatgaagctggaagccatcattctcagcgaactaacacaggaacagaagagcaaacaccgcatgttctcattcataagtgggagttgaacaatgagaacacatggacatagggaggggaacaacacacactgggtcatgttggggggtgggggcaaggggagggagagcattagaacagatacctaatgcatgtggggcttaaaacctagatgacaggttgataggtacagcaaaccactatggcacatatatacctatgtaacaaacctgcacattctgcacatgtagctcagaacttaaagaaaaatttaaaaaatttaaaacaagcaaaaaaggcaagaattgatggaggagctggaaagtggatataaatcattgaatctctctgcataagcaataaagactaataggacaaggctaaagaatagagagaaaatgtgggttagcagactggtggtcttgatgaaggagaaatgctgcttataggagaaaataagcagatgagttagaacatttagttagagagcaagacatatgcactgtgatgttggacatggtggtacttctggttacaatagcatccaacatgtgaccttgggagggtctaaaaaggtcactggaaatgagaacatcaaggaattaagaaaccagaggaaaaaacataggcacattgagtttccctgtttttggaaagttggtcataaagatatttgcagaaagtcagcattttatcttttttttaaggcaacagttctcaaatctgatattatctttctttgttcctccaagtatcatacattcgacgaaagaaaaaccatatcttcagtatatgagatcccctggatggcttttcttctcactctcattccctttcctacagcacattttaatttttttttctcatgaagctatgacagtctgtatcccctaggcctcctctcaacacacactgcttacaactcagcttccaccacccggagagttttgcccttctggatccaatacatggtttccataaataccctcaggcatatgttacaaatattaactcattaacaagaaccttgaatctctcctaggtactcattttccaagaggaacacattagtaggccatgttgaagaaatcagtctataggcaaagaaaagaaagattgagtatcctgtttcctactggaaacaactacctatttataaactttctaagctatatgtgctacacatattttaataattgcatctatacaaaaggcacttatacaattatttttccattaaattgaaaagtattcacctgtccaagtaaattgttctaaaatgattgagcatttttccatgtaaatatttaaatgtctttaaaaataacttttgtaatttcaaagttatgtttaccatcaaaaatttgaaaatgagaaggtgcaatgaaatccaaccataatctcaccactgccagaaacaaaccctcataaaattatcttttgttgacacccaattatatacaataaatggatctcactatatgtgcagcttctagcagtacatggtatatagtagatgttgaataaaatttgtggagtgaatgaacatacgtaatgttttgtattacactttaaatcttcttcatgcttttgaaggaggatgttataaaaggaatacatggaacttataaaaatttaaaaatccaatagttcagaaagagtaaaataaaataaattcttgtcactctgtattgccattacctggaaaaagtcccagtagaaatcctggaaactcacagagggagagaggaagagagagaaagaaacatgcagatataaatatggaaatatacttaagaaaaatggtattattctatatgaggtttagcaatttgcttttttccacttaatatttattaaatatatgtccatatcagcatatataaatttacttttttctttacaatggatcgtcctataacttaatcattaaattgatggacctttacactatagcctgattttacactgttaacaggaatgctctaataaatattattcagtcccccaacaaataccatttgccatacaatgagccagactgggaatttagacattaacaaaacagctaagatctctaacctcagacagttaatgaactcttagatctactagaagagacagataagcaaaaaagcaaaaatgaacatatcatttcaataataatttgcaatatgagggagaagaacagagggaacaacagaagaggcttctattggatgggtaggaaggtccctctgaggatgtaactgataatttgggaactaaaagatgaaaaaaagccaggctgcaaagagatgggaggcatcaaagcaaagggaacaacagacacaaatggccccaagagagactttgcttccaggaaattggaagacatgggacatggctattgtatatagcatgtagcccaaggctaggctggagaggtggaagattaatagatcttgtaagatgctaaatgaaaagtttaaattttattccaaatgtagtaggaaattactaagtgaaggtgaccatcagatttgcatttttgaacgatcactcttactgctgcaggaaaaaaggattgaagaaaggccagcaaggaaagttgttggggttatcacaggaaacaggcaagtgacagtggtggggcttggtctagagttggggcagtggaaatggaaatgtgtggaagatcaaagactacagtcaaaatttggtgatagattcgatatagcagatgagatggggaattgtcaaatgactccttccagactgttagcaactaggtagcacctttttctaaaatcagagaaggagcatgatttatattcctttgggcatatacccagtaatgggatggctgggtcaaatggtatttctagttctagatccctgaggaatcgccacactgtcttccacaatggttgaactagtttacagtcccaccaacagtgtaaaagtgttcctatttctccacatcttctccagcacctgttgtttcctgactttttaatgatcaccattctaactggtgtgagatggtatctcattgtggttttgatttgcgtttctctgatggccagtgatgatgagcattttttcatgtgtctgttggctgcataaatgtcttcttttgagaagtgtctgttcatatccttcacccactttttgatggggttgtttgtttttttcttgtaaatttgtttgtgttctttgtagattgtggatattagccccttgtcagatgagtagaatgccataaaaaatgatgagttcatgtcctttgtagggacatggatgaagctggaaaccatcattctcagcaaactatcgcaaggacaaaaaaccaaacaccacatgtcctcattcataggcgggaattgaacaatgaggacacttggacacaggaaggggaacatcacacactggggcctgttgtggggtggggggagggcggagggatagcattaggagacatacctaatgtaaatgacgagttaatgggtgcagcacaccaacacggcacatgtatgcataggtaacaaacttgcccgttgtgcacatgtaccctagaacttaaagtataataaaaaatattcgtatataaaaataagagcacaagaaaaaaaaaagaaaaaataaaataaaataaaatgggagaaggagaggagatgaactgacttatgagaaaatttagagttccactttggatatgtcagttttgggttgccttttggacaaccaagtggagatgccaattaggcacctgtgtatattagggtctggatctcagcataaaggtttgtgctagatataaaataaaggattcatcagtatatgaatggttctatatcatccagagagagatgaataagactacatgggaaaagtaggttgagagaagagaagtaccccaacctgtagagaccatttagagaaggctgttctggaaaagaagccagtagaactattagctgtggcatatgttacacaaaggaggactaagaactctgttagactgaggggttgggagtccaaaggaaaatctacttcagtggcaatgtgggggccaaaacaagattggaatgggtttaccagttattagggaatagaaaatataggaagacaattcttaggagaagtttgactttgcaaggttgcagaaaaagtagagtaactgtatgagttatggggtaaaaaaaatggttcatagctattgctacgtgtgtaatgtaaagatgggaaatcctagagcaaatttgtgtattaatgggaataattcagtatggtgagaggggaataaacatgcaaactactgaatgtagaggttagactgtacaggattcaaagtacagggttggcctttgactttctccaggaaagaaaaggcagaaggagaaaacaggattcagacaccagctgatttacagatttgtgataagaagatgtcgggaatcttccctctggtggtttctgttttctcaaaaaagcatgaggcaagtcatcagcttaaagcctgtgcagttagtgcatgtgagaagaacaggtaagtttgaagaggaaaggcaagatataaaattatttgcagacaatggaaaaagtagcttcctagaatttccaggtagtgttttatgtacatttaaatttggggctcgtgaatttgtagtgagatcaatctgccaagtgactcttgcaagcaacaatcatgagtggctgggttcatcaaggatgatggttctcaaagcacagtcactggaccagcagcatcagcctcagctggtaacttactaaaaatggtaattcttgggccccaccccagatctactaatatcagaatacctgggtataggacacagcaatattttttaacaagattcaccattcaggtgattctgatggatcttaaacgtttgagaatcataaatctagggagagctttgcataaatgcaaagaagggaaaggaaagaattaaaaagtatttgcaagaccatgattatactgatgatccatggaataaaaactagataagtagtgaagtcatcctttatagatatctatctcagccacttttagaaaaaatacattctaaaaagtatgattcttgaataaaaggtgtgcaattttaaactgtaatacatattgcacaatggccttccaaacactttacaaagtcatccatagggcaaaagaggcccactgtaatgtatgcttacccaacaacttttttcactgctgtccacttaataggtgacaatcgtatctttgggttgtttttgtgttgttatttgtttgcttatcttttattgaacttatgtccctaaaatgaaatgtacatgaaaaggatagagctacttctcaacaacatgtaagaaaaggaccagaagagttttaactggaacatgcaacaagtctatggtatgattatagctccattaataagaatgtgtgtgtggttgaatatcagtgatatttccattcacttctgtcctgggaagatttctatgggtcttatattcagttctggataccacagtgtgagacagagatttataatctaaaattctactctaatgataatgtgcctttctgcagccactgaacatgaggtataattgaatgttttgggaatatttggcctagaatatagacttttgtgaaaggaagagaataaagaaatgagagagcagcatgacacccataaagaaatatctgttacaaaaaaaaatgtttacattagctgagtgtgatggtgtgcgcctatagtcacagctactctggaggctgaggtgggaggattgcttgagcccaggaagtggaagttgttgtgagccaagaccacaccactgcactccagcctgtaatagagtgagactctgtctccaaaaaaaaaaaaaaaaaaaaaaaaaaatgaaagaaagaaaaagaaatatctgtatagttgacaaatgaaagatagtgtagtcttcttcatcataattttctaaaagattcaagtgtagaatttataagaagacaagttttattacaatctataaaaacccttcctaataaaatagaactgtcttcgctaatcctttaggcttcttagccaaggttgaatgatattagctgagcactagaacaacgatcttcaccttcttctctaactttgagattcatgacgctttgaggattctaagcttcattttcatagagataactcattttatctgtttcttctattgaaatttctatcacagcctgtttttccaaccaaatgatttgatattctcatttagcttcaagcataaaggtcacttttgtttgttaaactttgactttattagccaaccactatcaaaaaatcttttaaatttatgaccatttattgtggcatttgacatctatttgaacttcatgcctgtgggatgacaagaagaatgtacttagagactttttagttctcaatattcttacagcaggacaagttttgacagaatgataaatattaccagtaagtagaaaaattaatgtgtaacactggtactactgtttgaatttacaataatgcagttcattgtgactgttttggtagatttacttccaacttctccatggctgacgaaatgactgattatggcctaacaacctttgttacctccacaatctactttccaagaagtaaatcaaagttgcaaacatcaacctgctgccagcctgctcttttcctaaagagattaacccaacatcacaaacatgactaactggcctctctcatctacaaatctcccccaactaaggagttagagattctccatcacattcccagctccagacggacagacaccattgagagctaagatgccacagacaccaccgagagctaactagtgaaagaaataaatataaaggcatcttctgaaaattcaaagactgcaggagagtttgaaaagtcttctaacaacagttcaggcaagttaaaggggatatctagatctccagttcactctcacatgcttttattttacagtaagatatggaatcagtaaacaatagaagacatagaggtttcctacttcaatattactgttgtccctatgagaaaacaaatgatgaaaacctcccatgtaactttttcaggtcatggctggggtaatttagtgggtcactcttccccttcactgtaacctacaaggagaaaagggacactatctacaaatatttactagccatgggggaaaatattaggcatagcacacacagctaattccttcaatgtcaaaatatttatatagatataaatatatttaaatctggttcttatgaaactgttttatagattttttttcccaagtgactaataaactatctaagaagtttgtctagaaatttgctttgcttagaaatattctgttcttatggaactgtgagacttgtatatatatataaacatatatatacattatattatagatatacacacacacatacacttatacatataaatcttctgttcatatggagcttttaatagactttaatagacttttatatttatagaatatataatattaccaggtaaactatttctgtcacgaagaaaaactaaaattttctttctatctccatctccatcatgatttcaaattcatttaattaaatgtgatattggcaagatttgtaattcaacatttcagtatataaaaatttattaattcattctagtaagaaaagccagcatgagttaaattatctcaatcccaaatagcttgagatacattaaaattaattccacatataaaagtaactaggaaaagggcatggcgcttcatgtattgctactttatctgggagtacagtttcaggaagcaagagtgagagacatggggactaaaacaaggaagcaaacagagccaatacaaaaatgctttatggtgctggccaccagtaaggttggctgattttgcttgatcacaaagaaccatcttctgagaatccataaaaaatgcttcttaggacagtcagtctggggaagtaaaagagcaagaatttttttaaccggcttttgtttcccttgggtcacagattagcccgatagggcatgaacttcccatacttctgggttgtgcatttgtgggcaataagtgggatctcatggagtcccatgctttggctagaaacaaggacaatctgggtcaggaggcaaagggcatatggcttaggcatcatgtgaggttagctaggttgtactcacgagacaatggctggaggtcttaatgggctagtggtcattgcagtgattggaagaagagacagtgacggcaagatgattggaagggcatatgaacaatgataaacgcagacattttataaatatgggagaagggaagtagtgtgcgcacacatctgctttcctatgcattgaaagcatcttaaagggaaccccagaaataattaccattgattatctgttggaggcattaacttcttacatagagaggtaaagagacttgctgcatacatttttgtgttttgattttttattgttttgaatatgaatgtttcccattcaaaataattctgaaagtctttgaaaaagaacgtaagcacatactttaaaatcacaaggaagaaaaatataatctcaggaagtagagaaaaactgggcattggacaggggtgggaaagttaggagatgtgattgttctgcatcccccatttttaggagtggttgaagaagagactgcatcggtcaataaacagagatgccaaaatattggttaaagctaagtggcaaccaacagaaggaatagaactagaaacggggtttaattttcattttattcccttctgtactattgtatatgtatgtgtatatatatatatatatatatatgaattactaatagcaaaaacactatttagtacaaattaaagaaaaaaaaagctccaaaccatgcttcaaatactagctaagtacagagccactaaggtgctgcactaaaaatatttcaagtcagaaaatcacaactaacctgaagacactattatttgaagaacacccaagcttccggaaatgtttagaaaacaattaaggacaaaaacaagaaaaaaaacaagtgcttgtaactcagaacacggctagtgttatgaaagcaaacactgcacaagagtagctcattttataaatgtaggtttactagaaattgacatccagaattaacagctgcagttgcctgaaactacaaaaccccttgaacagaaaatcaatgaccacttactacgccaagcccagaaagcatggaaggataagcaagggcacatccaagcacacatttgcgaactataaagggcaatcctctaccaaagtacttgagaaatagcagttttcctgagagaatatagggacaaataagggtccctatgtgaaaatggagatattttatatgcaaataattggaatgacttgctgaaagcaaacagcagaaaaagaagagtctaagaacatgtcagccttctaaacaaacctttgaaataaatgtagatcaagtggatgttggaaaagctgatgtaacctggcacttgtgatttatctaaaccaatttttaggcaaacatgatgcaattatatatctgcattaaagtatcattgtaagagaaaaataacctgctaatacacctcttctggaaacaagtagaatttaaataagtaggaaaattactcagaatccattaaattcacttttccatcaagcactcctaactccatgtctttttctgtaaatccagaaataaaatcctaaagccttttcaaaaacccatcccctcaaatcaggtttgtaaggcaccataaatgagctggagaagttggttttctcagtggcataaaagtaaataaaggcaacaattaacatgggaaagaaaattcaaatattcatttaagcctagtgattcctccagaggcctacctggaaggcatgggatcatgctgtggtgggagaccttctagccctttgccaccaacagtgtagtctgtggatcatcatcattacctgagaacttgttagaaatgtagaatctcaggccctaattcagacttgctctatcagaatttacattttaacaagcgctctagtgatctgtatgttccttgaagtctgagaggtgctgtcatagtttctcaacattgaccccagagtcacatggtagtgcttatgataaaatacagattttcaagtgtcttttcaaacttactgactctccaagatcagccatgtagatgcatcaagcaaccacttcaagtaatctttcaaatcaggcacagaggatagacatatacatcaatggaataaaactaagagttcaagaaaaattcatacatctatggtcagttgatttatgacaaaggtgccaggacaatacatgggaaaaaatcatattttcaacaaatggtgctgagacaattaaatatccacatacaaaagaataaatttgaccataccacctcatacaatatacaaaatttaactaaaaatagatcaaagacctaaatgtaaaagctaaagctatataactcttagaagaaaacataagggtaaatctgcatgacatcaaatttggcagtggttcctcagttataacacctaaagcgcaagcaaccgaagaaaaatgataactttggcttcatcaaaatttaaaactttcatgcaaaggacactatccagagtgtgggccaggtgtgatggctcatgtctgtaatcccagcactttgggaggctgaggtggaaggattgcttgaggccaggagtttaggaccagcctgggcaacacagtgcgaccttgtctctattaaaagaaaacaacaaacaaacaaaaacagcaatcaaaaaacagtgtgaaaaggtgacccacaaaatgggataaaataatgctaatattatatctgataatggtctagtatccagaatataaaaaactcttacaactcaacaataaaacacaattaactcaatttaaaaatggacacagaatgtgaatagacatatttcccaaaaaaatacaaatggccaataagcacataaaaagatgtttcgcatcattagtcatcagtgaaatgcaaatcaaaaccacaatgagataccacttcacactcactaggatggctagaatcgaatagtcagataataacaagtgttgacaaggatgtggagaaatcaaaactctcaggtgaatgtaaaatgagagtctaaagtacagtcactttagaaaacaggacagttcctcaaaaaattaaacataaaactaccttacgacatagcaattccacttaaaggtatatactcaagaaaactgaaaacttacgttcacacaaaaacttatacaaagcggtcatagaataagcattattcataaaagccaaaaagtgaaaacaactcacatgttcatcaatgatgaatggataaacaagatgtggtatattcacacaatggaatattgttccaccataaaaaggaacaaaatactgatacatgctgcaaatggatggactttcaaagtattgtgctatgtgaaagaagccagtcacaaaagaccacatactccatttatattagatataaattacacatataagaagtatcccaaataagcaaatccatggagacacaaagaagattagtttttgcaggggcctgggggaggagagagtggaaagtttctgataatgggcatagaatttcttttggggattatagaaaatgttctaaaattagatagtggtgttggttgcagaactctttcaatagtctaacaatcaaaatcaggtgcagttctcacgcaaatccttttttattcagttgtggtagtagcactaccaaagaaaacactaatggtttaatagctaagggagagagatggatgaggagctaagattttacatctgtttttgagacagggtttcactctgttgcctaggctggagtgcagtggcatgatctcagccccctgcaacctctgcctcctgggttcaagcaattcttgtgcctcagcctcccaagcagctgggactacaggcatgcaacaacatgcccagctaattttatttatttatttatttatttattttgtatttttagcagagatggggtttcaccatgttggccaggctggtctcgaactcctggcctcaagtgacctgcccgcctctgcctcccaaagtgctgggattactggcatgagccactgtacccagccagtagatatggtatttaattataatattatcagagaatgatgtggtaaaaataactttccaggcctcagctttgctccagttcctgcatcttgaattttctttttctttcaagacacaaggcagagcatttgtatctttcaggccctatgtcaaaagtcacctctttgagaaccctcccagaaccagggacagaacgtaaagaccctacctcctatatctatatcccttatttctgtaactcactgtattttagagctctgtcactgtgtgggctttcccatcgaaaatgagtttgtcctgcaaagagatagctctttgcaaagctaccttctcttttcactaagtcctctccaattctaagtcagcatcctcagctctaaaatggtgacactaaggagtgtgttatccattaaatgagccacagataagagaacctagcatgactgtgtactgaataaatgctagctattattattcatattatattaatttcctatcgctactataataaatcaccacaaacttatgacttaagacaacataaatttattattttatagttctggatgtcagaagtacagaatgggtcttatgcatgaaaatcaatgtattggcagagctggttctttctgagggcccaaggacagaatccatttccttgccttcttcagcctctacagtctacccacattccttggcttgtgacctcttccctcatcttcagagcacatcactccaacctcagcttctgtcatcacatctcctctgatttgaccttattgcctccttctcatatggactcccgtgtgatcatgttgggcctactcagttaatataagataatctccgcatctcaagatccttaacttaatcatatctgcaaatcctttttgtcatataaaggaatgtgttctgtggttctggggattgagatgtagacatatttgaagagtcattattctgtctaccacatacactattctatatttttagtatcctagtttcctccatttcaaatgccatgccatttgtcatctcccttttaacagctggtgccccacatttaaaggtttggcaaatactcagtgttggcaagaaagcgaagcacccatacggcagggtggagcttaaattagcataaatacctttgagaaaaacttgaaagtacctaataaaatgcaacattaacacaccctgtgacccaatcccactaatacatacatactctagagaaactgagacccacatgaacaagaaaattgaaagtttagtggcattgtttacagctgcaaaaagttgaaataaacttacaagtcaatgtggcagggatactaaaaattccccattcccttcctgaatacaaagcaagactatgttttccaggttcccttgcagttaatttgggggccttgtggctaggttttggtcaatgcaaagtgggcaacagtaacgactcccttccagcaaaaaataaataataataataataataataataataaatccagtgcaaccctgccttctagcttagtagacagctggatgatccactagaaactcaggggaggacctagaaaatgacaatcatgcaagatggagaaatctgagatcccgagttagcacatgcaggagagttccccagccagaagcattaactttgaacttcacatgaatgatacaaaagattttattgtggattttgggaatttgtattaacagagatggtattatttactctgacagtaaaacggacaaagagacaagacagaaaatagacaagttgaggtgtgttcagacaactgaatattgtaccaccagtgaaactgaatgtattagcactttgtgtgtacccagggatgaacttagaaacacaatgataagcaaagtaaggtgcaggttataaataatataaaatgaaattccttacattgtttgaaagaatacataacatttctacatactgtttagaaatactaacacaaggagaagtacaaaaaagtatgtgaaaataagaagtatcaacacccagggagtggcttctttgaaaacagtttggccgttcctcaactgagttaccatatggcttggtaattgcacttctaggtaagtacccaagagaattgaaaatgtatgttcacacacaaacttgtacatgactgtttatgaaagaagcagtattcataatgtccaaaaagcagaaacaattcaaatgtccttcaactgaagaatggctaaacaaaaattattcagccacagaaagggatgaaatactgatccatgctagaacatggatgaaccttgaaaacattatgctaagtgaaagaagcgatcgcaaaggaataagtactgtatgattccatttatatgaaatgttcagaacaggcaaattcatagagttagaaagtaaactggtaggagtataaggcttggagtttggtggggtaggggaaaataggggatgctttctagtggtgactgagtttctttctgagttgatgagaaggctctaaaattgattgtggtgatggctgtacaactctgtgaatatcattgaattgtatactttaattgtatgcaatatgaatataactcagtaaatctgttgttttaaaaaatgagaagaatgattatctctagaaaaacagaaggtaatgcaatctggggagaagtatacaggaatcaactagtatattagtaatatgctatttgttacactgggtggtaggtatgtcgatgttctttatattattctattttttatgtgatgaaattgcttataattttgtttagatgctacttctggaagggagatgggtgcccttgccagtgtgggaaacatcatcaacatcatctccaaattctcagccaacattctgagcctttagcatacactagatatactatgaagcttacttaaaaatatagatctcagggcctcacaccagatctctcaaatcagactgtctggaaaggtaacttgaccctgcaaaatgaacaattcagttagagaacaagtgatactacttttctgttgaggcaatccaaatttttttttttttttttggcaggctcatcatgataatgactccgattctagggtttgggaataacttggtgtttaaaaaaataaaaaggagaaaacaagaacataccatgaggccacaagtatctgcttttagaaagtaacagctgagacaactgaatgatcacactcaggcaaataactagatttttttcctcccatcagggacttaattgggtgtatttataagcaccactccttcaaaactctgagctcaggagctctttgtgctgtcattatagtttttttaagatgctttgtgtttaatggctgtttgtcaaacatttcttaaactattcacatcccaccttcctgatttctaccacacagcacctgtacaattatttatttacaatttcatttaaaccaactttatattgactcatagctgtcactgatttttaaaagcttatgaactacctaacataacaggtttaccagaaccactcttcggagaatactacttgaatggctgcaaggtcagaattttactctgaggaagcctctccattcttttaagctgtcaaactttggaagactctggccataggattctatttatctttcctctgacattccattttgtaagcattttcctaacgccgaagctctcccttccaatgctaaaattacatttgctacatcctcccgagactcattcctttcattttaccaccttatttttgtcagagttaagtccatggtcacagatgcacttccaggctccttccacctgtgcagcagtggttcccaacctcctctgctcctggagggctttcagcactacataccagatcaataaaaccagaatcacatggaatggggtccagaggttgtaaatttgaaagcaccaaaggtgaccccagcatgcgcttttaggaaaatacaaatagcaaggcaaaccaagaatgtatcaaacagccagccgttgtggctcatgcctgtagtccagttactttgggaggctgaggtgggaggattgcttgagcccaggagtttgagaacagcctgggaaacaaagtgagaccctgcctctgcaaaagattaaaagaactagccaggaagtgtgcacctgacgtgggaggatcccttgagcccaggaagtggaaggctgcagtgagccgtgatcacaacactgcactcccgcctgggtgacacagcaagaccctgtctccaaagaaaaggaagcaagaaagaatgtatcaagggcagtgtttaactaggcttaatttagacacaacagtttatatttcttaagtgtgatgccaaatttaaataatactttgaccagtagctgttaaaattgtctaattgcaaaatgtacctaaaatgtaccctctctgctattaccctaatggagaatctgtttcccaacctgcattaataaaaatgtacaagatcacatttcaccatatctcacaaaaatgaataaaagacttgcaaagttaagtttcaccacgtatatatacacacatacacatagacacatagacatatatacatacacatgcatacatatatacatacatacatatgcacatacagttgctagatattcaagaagtaactattcaaataactctagagatatgaaaaacactatggaatccagctcacaaaagagacatctggcagccacatcagcaatagaagcagtataatggtttatgtggatagtatgatttgctgcagattttcatatattctgtgctgcctaagcactacttgaatatctatttaatgactatggaatatttaatttgagcaaaatgagctccagattgtttacaaagtactggccaatgatcccctccttataaattaatctgccccaaaatatgatcaaatttgatttcttgaaatgtacttatcatcgtgacattgtatactgtctcacagttctcctatggatgccacttcccaaaggccgcccagtaactcctaaatgctactaaaacattctctctgtctctctctctcccccaccccaaaaagaaatatgtgttcctagaattcaggggtaaaaaagaaagcttttggtttgttttggtttttactaataaagaacagtccaggacaaattctaccatgcaggggatattagtctaataatacagagtgagaacagaagggagaagtggcactatgaccagaggccaactactttcactctcttaaaggttgcatgactgcctgagactggacagcccacggaactgaacaagaatggctgcattcaacctagctggtctatacatctagaaactcagtcaatcttgtatgtatctatatattcaaattatgtagtccagcacttgaatacatgtattcttttcaaatattatctttaaagcacacttccaaaatttaagaataacatgtgctcaccccgccactgaaacaatgcaaagttggacaatggaagaagttactatgctccttctaaccattctacatcccttctgcaaaccacaccctccaaaaactatggagtcagactgccttcttcaaacactggcttctctcttggtgactttgattaaggtgagtttatctccatccacctcagtttccttattctcataaagaaaatgaattatagcacctacatcatatacatacctagttgtgtaatgtatattgataatattaggggtaatggggttgctcaaacctgttttagaatctaagatatttcctaggggatcacctttcactaggtcttttcaagaaaatatttttgagcaccaacatgtgccaatcactattctagttcctaggaagacagcattaaaataaaagactattataaaaatgaaatgtcaagccacagtctgggagaaaatatttgaataacataccttaaaaaggccttatatctagaatatttatttttgaatttcataagctcaataacaaaaaaaaaacgatgtttaaaatcaacacaaaatttgaagagacaatatcaccagagaagatgtacaaatggcaagtaacatataaaaatgatgttcaacatcattagtcattggggaaatgtgaaataaaaccacaatgagatatcaccactcctatcagattagcaaaaattttaaaaagacttactataaagtgttggaacaattggaactctcagacagaaaacaggttgatagtctcctatagagttaaacatgtacctaccatatgacccacccattacactcctagatgtacacccaagggaagtagagggatatatatgaaagttcatacataaatgtccatagtagcatcatttctaataggcaaaagttagaatcaactcaaatgcacatcaacagatgaatggataaacaaattagatagttagaaggaataagatctaatgctcagtagcacaatagggtgactacatttaacaataatttattgtatatttcaaattactagaagagtgaaattggaatgttcctaatgtaaagaaataataaatgcttgatgtgacggatatcccagttaccctgatttgatattacacattgtatgcttgtatcaaaacttcacaagtaccccacaaatatgtacaactattaggtatccataaaaaataaaaataaaaaagtttaatagtaacttaaagctaaaaaatctatagcaaactatatagtataaccatacaatggaatgccactcacaaatgaaaagaaataaactattgatataagcaacaatatagatgaatcccaaaataactgtgatgagtgaaagcaaaataagagtaccttatgtatgatttcacgtatataaaaaattctagaaaatccaaactaatgaacatcacagaaaacagagcaatagggacctagggtaggagatataggagctacgggaagaagtggtagagagggactgctatggagcaaggacaaacttttgggggtgacagatatgttcattagcttaaccacagtaacaattccatgggtgtatattgtaagacaggtatacctcaataaagctcaaaaataaaataagaaaaaatataaacaaggtctttaccatcttaggagtaacattgtgatgggggtaaagctagacagaaaaagtttaaataggcaaatacataccacatagttttaagtaatacagttaaaattaattcacatgatgttcaccaaaaaatgttcagtaacgttcatagcagcagtgtttgtaatagccctaaatggaaaaccagccaatgtccaccaagagcagaaaaaactgtggtgtattcatacagtggaatgctatatagcaatgagaataagtgaactgcaactacacaaaacctcacggatgaatcttactaataacatagtgaatgaaagaagccaggcacaaatgaggactttatgattccaattttaatcgatgccgacaaagctgaggatggcatttgcccttgggtgtagtgagcaactagaaggaaatccagcaagggcttctgggtgcttgtacaaaggtgtgctcacttggtgaaaattcatccagttatagccttaaaatgtgtgtccttttttgtgtatatgttaaccttcaaaaaattactttaaataaaaatgaacccatatgataggatagagattaactggctattttaggatgaatgtcagaaacacctttctgaataggaagcatataagctgagatctgaaaaacaagaatgagccaggtccatcaggttcttggtcaagtgcattctaggcaagtgcaattgcagtggacttcaacaggatggccaggcagagaatggtatgagatgaagtgggaagagtaggcaggactatgttagaaaagggtactataaacaaggcaaggagtttacattttatttagatccaaagtgaggccgttgaaagattctacataggaattgttatgaaattatgggcatttttgtgaggttttttagctgtttgagtcagtttcatcatcagtgaaatgagaatgaaaataaatcatataatgcacatgaagggcttaacactgtgtctagcatgtcttgaaaaaatgattgtggttaatattgccatatttcattgaccaagaatttaattgaccaagacaccaagaattgcaagatgcaccattattttaggaatcactgagaaagaaaaaagagttgccaattaaaatatcacaacactgttaactattagagtttttagtttaccttgtaaaagtgttcttttagatttactgagtcagagctttatatcatatgccactctttcataaaatacatacataaaaaataaatatataagaaaaacaaatcagctaaattcttactaaagtatctgtccattcataatctgactatcctgaatcatttttggattcagaatccccaaatgccatattttgagcatttgtgcaggcaacagcaatgacacgagggtggacacctggaagtcatgtgacgcttttgctatctatattgctagccatatgtcttagtctgtttgtgttgctataaaagtatacctgaggctgggtaatttataaagaaaaaaggtttatttggctcatggttctgcaggctgtacaagaagcatagcacctgcacctgcttctgttgagggcttcaggcagcttccacttatggtggaaggcaaagaggcgctactgtgtgcagagatcatgtggcaagaggggaagcaaaagagaaaggaggagatgccaggctcttttcaacaactagttcttgcaggaaataagagtgagaattcactctctccttcgagaatggcaccaaaaaattcatgaaggatccgcccccatgatccaaacacttcctaccaggcccacctccaacactgaggatcaaatttcaacaagagacttggcaaggccaaacaaaccatatccaaaccatagcaccatataaatctggtttaatatctgcattgaaaatatgaatatgaatgcctgccatcattcctcaggaacacagagtgaaaactgaaatgcatgtgtgtagtccttggagtttcttgggaagaaagtcatgattaggcctcagttgacattactgggccatccctcccttctgaagcagctctacaaatccatacactcaggtttgggccatcctcattgctccatcccctaagacagaccctccccagctctgacatggaacagtaattactttcacttgtcaaactgtcgttcaggtataattttgcaatggtcccgtcggttataattctctgtgttctgaattttctgcttttctcactgtggtccctcatgattcaaaaataagtctttctaatgattagtggtctaccatagcaattctttttgtttctactatttgggattgttcctttcttctgcttattaaaatggtaattaaatttaatcccaccaacctactcaggggaaaataaaatccaatatgcttctatttcacatgccaaatgacagttcctgccagactgtcacataactcaaaccaaccagccccttctctagtgttcccttccttcaggccagacacacagcttctcataatgaaggttgctctgtaaaacagaaattacatgcaccattcagagagctccaaagtcacactacaatagaactccctagttctgagtcattggtgtctaaagtcagtctgatttcatgaaagttctgaattataggagattggaactctggggtcagtacttcagggttatgagggcaggctctggagaaagacttgactgggttcagaaagtggcagtgtggcctctaaagcctcagttttgtcctctgaaatatgtgattatagggagcatatattctgggcaacttgaatctgtgttcctgggaaatttaaaaaattaaatattaaaattaaatacaggaattacaattgtactaacttcatagggttattatgagtatattatctgtcccattaatagcgaaataaaggttaactgctgtgatggttaacatcatgtgtcgacttgactggatcgcagaatgcccacatatctggttaaatgttattcctgggtatgtccatcggagtgtttccagaagaaatttgtatttgaatcagcagcctgggtaaagtgaattgccttccccaacatgagtgggcattatccaatccattgagggcctgaatggaacaaaaaggcagaggaaggttgaatctgctctctgcttaactgcttgagcttggacatcagtcttatctcctgttctctgcactcctggttctcaggtattctgactcagattggaatccatactttctctctggttctcaggcttttgaaccccacaactggcttgactgggtctttagcttgcagatagcagatcatgggacttctctgcttccataattatgtgagccaataccataccttataataaatctcctttctccagagaaccctgactagtacagcagccatgactattactactggtatcagttctattttttctactgtaaccattactatgcagatgatgcaaggtatagagaatatgggacacctggaatcttgtgtctgctactaactgctgagacctggtatttattttacaggaggaaacttatagtataatatgagtttaagaattatacaagccaggcatggtggtgcacacctatagtcccagctacaaggaaggctgaggcaggaggatcacttgagcttaggagtttgagtccaggctgggcaacatagtgagatcctgtctctaaaactaactacatgaataaataataaaaattaaaaataaagaattatgtaaataagaacactcaacattataacagtttttggctgaattggagtctcaaaactacaatttcaagctctcagtttccatgattttaaatacgtataatttttttaaaaatctatccaaatgaaagactttcaagtctacacatagaagagcttcaggtaccagcaaatgtcataatgtacattcattgagcactactaagtgcctacttctctgctaagcccgatttattcattcatttcttccttcaacacacacaatagtgatctcttaatatgtgccaggccctggagatagcaggccaaacaaaataggcaagatccttaatctccggggaaagatatcttactggtgaagaagaaagataacagaaaataaacagataaatgaacgagataatttcagatggtgaaaaaaatatgtagaaagtaaatcagagtcacattttggatggagtgatgacaacccacagcagcccaaacaaggtacctaataatatttttttaatgcttaggaaatcagtgcttagagaaactaataaatttgaccaattttcacaactagtggtctggacagggtctacaatccatgcttgccaagtccataatccaatctcttacccattacataaactgcctttgcacacactctatgatttatgtcaaattccaaagctatcaattctcagttaatgaggtcacacctggtgaaggccaggcatggccaatctctggcagtgggactttcttcataggaacacagagcagctaggggtcatcagctatctttgccacataaaatccagcttttatttatctaaaacaaatactcaactccttctgttgtaaaatcaaagaaggattttttaaaaagaaacacaaaagaagaaatgcaaattcagagtaaacacccttggtatctgttcacttccttttaaaatccagttttaacaaaataccctgctaagtcagtttagcaaaatccttccaccttgacatctgatcactctccatatctgatcagattcttcctcctcttccattattcctcaggtatgtctgatcatgctggactgtcttaagcaagaatcccattaggtcagtttagccatcctccttacccagatgtttcctcttggtaattttccatccactcctactctgctccttggcaatataaattactactggtccatgctgtgttcagagttaagctccatctctgtccctcactgtgaaatctcattgctcggtccctctacctatcatgatggccctaaataaagtattttttactctgctttaacgaatatcactgaaacaccctccattaacatgggaacagtatctcgcaaggatgaatcttggtggagactgataatctgcaaaaaccaagaattcaaagcattccaaggaaagcaaatatatctgaacagatgcacatagaccgtaatattcctaaagcaatttaatatttaatctctgaatggatgaaaattatcataaagtctatacctgataatattccacggaaaacactagaaacatggtctcagaggtccagaagacagtcattaattaggcttctaagttttccactttctctagaatgcatgaacatctaaaaccaaacaaaatgatagctgtatcactgtaaaaatagaacacaggctggtatgaaggactgcaaatataaagaaacatgggtattggacatcatttcaactaaataatatcagccaaataacatatagtagctatcaaagttactttccaatttgtcttgtccaaaagttgaattgatctaataaaacatgaagctatataggacaaaataataccaaatcacttaaatcactgagagaaaatatactctgcatgagaaagccaaagaaagaaagcatcaggataagctgagggcttgggtgcatatatttcatgttaccttgtaatgacaatatgtcctcactaactcactataagttcatttccctgagaaatgtttaggatgcaattttatcaccgatttccctcccattaagtaaggttctgaatatgcaaatgatttttcattttaatttcagactaaatcagtaaaccaacacaaatctatttcttaccaaggtttcaaaatagaagcagcagtacaatggcaaaataggacacaaagatgaagagctaagatcacaagaggatagggctaaagagtctctgtatggtgtctttggtaacttatagttcatttccaggaaaagatagatattttcaaatgcaatcagtccagtaaattagggccaacgaacctgtgaccagagaaatttcactgggtcagaaatctttgtggagactataattatattgctcaattttacttttacctacactaatgaacatttaaaaaacatttttttttttgcctgaccacattctttgctatgcttctgataatggcctcctgataatccttgcagatcctctctacccccgttctctgtcaaggtggtttgggagaaagtaactccactctgatttctgactctaggggtgggtttggacccaggtgggaatacaaaagccacacattccccaggcaacagtaattagacaaggaaccggtactggcacatgacccacaaatgttatattagaactactgaaattcaatcctgagacttttgttagaactattgggctagagagtattttttgctggattttgagatcagtaggatctaaacccaagagctgtaggggggctgtccatgttgccagaaaaataagatagcttgcccaagaaagaaaactatacagaaacactcagagctgaaagatggggaagaaatggcaccaggataatgtttttgagctcccgatccaactgtatttctggatgcttctgctatacaggtcaacaaattcctagttttcttgatccactttgagttgggtttctgcccctttcaaacaaaagaatcctgttgaagatacgccctgcttcccataacatccagctgcaaagacaagtttaatctatagaaaatctattcattatttcctcctcataatatcaactgtcatgaaaatgaatttgagagttagaaataagtagaaggaaagcttattttctttaaatgcattttataaaactcagatttcccctatatgcagaaggcctctcctatttcattttagagtctaattaaattgggccacaacctatttttattgaaagagttgtttttactcactgtgtccattcattgatctactcctcacctcctccaaggagaaatgaaggcaatatgtaacccatggggctgctatttggattaaaggagatgtaagtctcagtaggtcacagaattcttattgaattcatttgtttagtaaaaatttattgagcaactgtacgtggaaggtgctatgccagatgctctaacttaactagataaaatttagcctcttccttcctgcctcttccagtccaatgggacaaagaaggagaacaaaacacacataattaagaagcaaggggacccattttacaaagtatggaccaaggcaggcacaacaaaagtggaatcacctcagatgtgaatgttgtcttctgaagctgtgtaacacggaagccctgaatataaaggaactgaatggggagccctgaaatgagaaccagggaagagcagaactgtaacactcaggttcaacaattagagtaacccaaggtggtaaaggaaggctcaatgttggtgatgcaaagcccctaagcaccactcttcctccagccctgatagctctccccaaatttcttctctttattcttttaggaacaccagaaattttgaacacttttctgttactccaagtgggaaactctagaacccatggtgccctctggtgtgtaaaacaggtttcctgtccataccaatgataatggccaggtgcgatggcttacacctgtaatccagcattttgggaggccgaggcaggcggatcatctgaggtcaggagttcgagaccagcctggccaacatggtgaaaccccatctctactaaaaatacaaaatttagctgggcatggtggtggggacctgtaatcccagctactcaggaggctgaggtgggagaattgcttgaacacaggaggcggaagttgcagtgagccaagatcatgccactgcactccagcctgggcaacagagcgagactctgtcaaacaaacaaaaaaagatgatgagtttcttaaaacccatccatatctcaaatccaaggttaactgtgattattttcagaacacaatactttgtagcctgcctaacctgagtatcctattggcaatcactgatatgacctaactttggatccccctcttgctccacaattttaaaacaccttctctactatcctaaacgacctcaactgatacattctcatcgagaaagccacctgggttatttttgagatcctacttcaggctgctaactgcccaacatccattcttcactttttcctgatcaaatacactttatcactcagttaaaattcactgacatttactgtttatccacacatacagaggactaacacttgcgtttctgctctcagcatacttgttacattctcttctttctccatgcaaaattatttttggtttggggtttcttgcaagacagactcaaaatcattttgtattatatattctccagctttcccaagtttcaagatagctattcctaaaaatgatcatgggcatgaacaacatttttggggatatagagttccaaataatgccatggaagatacagcttatcaactggtccaccagtaccctacaagaatgcaggcccggtgtggtggcttacgcctataatcccaacactttgggaggctgaggcaggcagattgcctgagctcaggagttcgagaccagcttgggcaatatggtgaaccccatctctactaaaaatacaaaaaattagccaggtgtggtggtgcatctctgtagtcacagcttcttgggaggctgaggctgaaggattgcctgaacccaggaggcagaggttgcagtgagctgagatcctgccactgcactccagcctgggtaacaacagagtgagatctgtctcaaaaaaaaaaaaaaaaaagcaattacattacattacacagtcaaatgatttactcttaggaatattttatctttctgtttcattacaaggtcagttgtagccttacttatgtttcatttttcaacattagatgcgtttataataacagctccctgcttaattatgtacaattgaacacctatagttatatcatcttgttcatttggaaatgactttgagggcaacttaacactctggctcaatgctcttttacccactgtacatggaatgttcttgtctacactaataaattgcccaatcaatagctcacaattgactagcagaagataaattttcttttcttacaacaacttctaaaggatctctgaagtttggcaggcacatgacaagggaggcaacaggtatagatgtagcaagccttattagtatccacccatatgcctactgacttccaacagtcagtatctgtgtttctaagggcttttccatatcatgggagtttggaagtacagagaaactaacattctctgggaacagccttcaactaatgactgatgggagttggtgtataaatatctcagttccctcccctttgggtggactgatttggaggcatgagttttataccatttcccagttcctctattttaatactctaattttggcagcctttctgctatgatttagatgtacatgtccctctgaaattcacatgttggaacttaaacctgaaggtaaaaatactaagagtctttagcaggtgatcaggccatcagagctccactgtcatagatgagattagtgtccttataagaaaagcttaaggaagcaagtttatcccttttttacccttctgccatgtgaggacacagcattcatccttttccctctggaggacatagcaacaagatgccatcttgaacagaggagaagccctttccagacactgaatctgctggtgccttgatcttggacttccaagcctctagaactatgagaaataaatttctattatttaaaaactacccagtctaatgtattttgttatagcagcaggaatggactgacagtttctgatatggtttggctgtgtccccgcccaaatctcaccttgaattataataatcctcacgtgtcaagggtggggctaggtggagataactgaatcatgggggtggttcccccatactgttctcttggtagtgaataagtctcacagatctgatggttttataaatgagctcccctgcacaattaatcttgccttccgccatgtaagacgatcgtttgctcttccttcgtcatccaccatgattgcgtggccttcccagccatgtagaactgtgagtccattaaacctctttcctttataaattacccagtcttgggtatgtctttattagcagtgtgagaacagactaataaactccccttccatgtgttacttgccctctctcttaacggtattccatgaacgttccaagtaaactacttgctctcgaatccttgcctcaaggtctgtttctgggggggaaatcctaactaaaatagaggaagttaaaggaattacacttagaacttgagaaaatactttttaccttttttttgtgcttgtagaagattaatcttaatcaatagagcaaggcagcacaatctgctatttactagccataaaatgggaataatgataacacctaatttataagcctactgcaagaattaaatgagatagtgtttacaaaacatataacacaatatctggcatataatacatgttcaaagaacttgattactgctcaatcattgttttaactctgaggcacatcttttctttctataaccaaacaaaaaactgaacaaatacctagtatgtgccataattccatactttttaaatattagacagtttcaaaaaaatccctgttgtgtttcatttgaattaaaccaaaatggagaaagaatattaaatctccaaaaggaaggccgtgtgtggtggcttatgcctataattccagcactttgggaggccaaggcaggaggattgtttaaagccaggagttcaagaccagcctgggcaacaaagtgaggccctgcctcttaaaaaaaaatttccaaaaagcagttatggtttatctagagaagaattggcaggactggagtaatggtgtccttagcagcattagaatgaggttagggtttgaaccagcactaaaattctacttccaaatgaaaaaacttgagggtctttgcaggagacaaatcatatgcaatttggagtgcactgcaaaaatggtccccatccctacctgggatgctgtcccatgtgtatctacacggcaatttcctctcctccttcaaatgtcactttctcaattatacctattctgaccatcctatttaaaatcacgcccttcactgccacccatcacagcccttttgatttcccttatcccactctattttataaagcactgatgaccttctggcattctatacatttatttattatgctgtttcctgtctgtctctccttctttttttatcttctatgttcacagaagaacatttttatcttctatattcattgatatgcctcctcatggtacatgccacctgaagtaagcagaatagtactcaaggtgcagctgctgaatgggtgagtgactcgttgggaatgttcattgtaacatctgtttcctattttttaatctagtctttacaggagaaagcagacataaacagacactagcctaatagacagatccagttatcttgttttgatcctactagttaagtgagtaacttagagccaaatgttcttctgttttacagtgatactcacagtcattgcacaccctggtctttgtagaaaagaaaattcttttcagtgggtggactgtgctctgtgtttaaaataaaattgaggtctgaaaagaaatgggaagctactgctatcatccttctatcccaagcaaataaaaactctagggacaactctggaattttctatctcacttgttttttattattttttagtaaggtacagtgatattgttattcttagttgccctgggtgattccaatattgattttgagatttttccagccattctacagaatgcatatcatttataaggttctacttcactgctgtgagcacagttgcattgtgaaagttttatattttccagatgataatatcatatgaaatatgataccatccttttgcgttttgataatccctacctccagcaagcttaagaccatatgatttcttttccatttcagtttagttcaaataaaacacaacagaaattttaaaaaaattgtccagtgttgaaagaaattttgaaaaagtagttgcagcagcctatttatgcaaatgtttttaccaaatatctctaaactctatacttttaaataaaattcataccagcataaagtcttacttctaaattttttttctaggataaaatttttaaaatgcatctttctaaaatgtcatttgcgttatatttaaattattaaataagttggtccatatttttgggaagcaaaattaagaagacacaatatatgaggataaaatgatccaaaaatatagagcaattcaaaggttataatttgaattatattcactcaaattcaaaggttatacattcaagactttaatgaccaagagggtaacataaacaattaaaatggcctgattacaggcagtagggagtgatggggactgtgacaaagtgaagactccatgactgatccatgttaaaggcagctgttactcagctacagcaaatgattgccatgaagaaacatggtcagtgttgacaaattttgcaactaagtgtatgtgtctgtatttgtgtgtgtgattttttgaataagagaagtcagaaatctagatttttttttttctgggaaatttcacactgtctgtgttaaacagaacacatctataccacaaaattagacactgctctaaattgacatagtcaaatatttagtacctaatagaattcacagtgttctacacctttcagctttagaaggatagctcaattcaatttcaaagatagtaaaaatctccagttttcatatcctgttacctaggggttagtaggctctaactggtaagtgattctttcgaccagtgtagactcctaatatcccaacacaggaacttgccttagaaatccaaactgaagcacacaaggtaactgctgtcatagatagtatccatatattgctttaaaaaatccctggcatttatcatcctagaatcttctatctccgagaattctgccgcaaatatatctgactagaagcctgaaaagcccttgggactcaccctggggaacctcttgctgggatcactcgctttgatttatttctctcccaaactttcgatttcttcctcattttatagtgcatctgttgctatggaaacattggtgccgaagacttgggcagaaccatataaaaccccagctttcactacacaaatcaagggataattgagcaggaatcacaccaccaattaggcatattcataccaggtctgggacaatagagcagtaggtgttaagctgcatctagcaatcaaataattattctcaatgtttttcaagaagctcagtttatttactctattgtggggaggccggctctcagcttatagtttgcttcaccactttctctcttttccatgtgtttagaatctctaccttatacccatgtccaatattggaattttttttctttctccaaccagaaacaggtagagggtttaatctttctctctacctcttttttattcacagaaaatagaaaaccagtattagtgtgaaactagtttgtgtgtttttaaagaaaatggatgagataacttttagattagctgattttagattagccaatttttgtttaggactccaaacagaacttttcttatctgctgagttgctgtataccacagcattgattgccttggattcagatgatacagggtttgactcagcttcttgaatctatctaactgcgtgatattttgccttgagtggccttttaaatcatagcaccgccttttcacatttgcattcaaattttttagcctgggtaatatccattcatccatagacatttattaaagacctgacatgtgtaggcataaagccaggtgctggggatacaaaggtgaagaaacaagatgcctgctttcgaagagttcccagtttagtgcaagaaggaagctaaaaaaaaatctacaaaacattgtgatgactgtttgagaggaacaatccagaaccatgtgggaggattttgggggagggggagggtgggggaatgtggtagctgtatagaaagttttcaatgaaggtgtgatactcagataacagaagatcattttggaggtaagaatgaaagagaacagataggaggctgacagaagatctaattgagagatgcaaaggggagtggcagtggagacagggaagggggcacatgcaaaaaatgttttttaggttgcaatttatttatttacttatttatttagagacagagtcttgctttgtcgcccaggctggagtgcagtggcgtgatctcagctcactgcaacatctgcctcccgggttcaagcgattctcttgcctcagcatcccaagtagctgggatcacaggcgtgcgccaccatgcccagctaatgtttttttgtatttttagtagagacagggtttcaccatgttggccaggctggtctcgaactcttgacccaggtaatccacccacctcggcctcccagagtgctgggattacaggcgtgagccaccgcgcccagccaagttgcaatttagatactgcttggctgtgagggtaggagaagagtagactctacttggaatctgaaagagatagcacacaacctgcaggtaggtagctgttatcttaaccctcaaaaagggttaaaccactacttaactcaaggcgtgaataactattattcaaatattattggcaaattatttttgtttgtctgtttctctatctctaatacctagagaagagagaacattgtcctaaaaaccaccaggatgagaaaaattctaagttgtttctgtaaaatttttttaaatccccctcctccgtcagtgtttttatttttagaagttaaatcatacccacatagcaactgttcctactttagaggaagaatctttcttttaaacaaataaagtgtgaattttctattcttccagaaagttcacttcctgggtcagtaaactgtaatgtagctataaaataagggggcaacacagctgacagctaaaaacaattagctaaaaaatcattattatacaaacaccatttgcatgaatccagtgaccattagaagcaaacacatgaagtttcctctagaaaatagctaaagaatttcttaaatagtatgccaaacttgaattttaattggaaatgaagctaataactgttgtgtctaacagagatcttatatttggaaccaaaggtgggagtttctctctctctctctgtttttctctttccccttctctcccttcttcctttccttcccccattatgtaagttgttatcaaaagtgatggaaccaatattgattgcagaaagtcttcttggttcagttggaaaatagggtaatagaagagtagtaggggtatgaaccagtgctttagagaaacaaaggtacaccttatggccaatttacctttatcatcaatgacacaatggcaattccattgaaaattagctaaggaaatcccacaactggacatctgtttaaaaatgtaagttaaatgtgcttcttatacaaacaaccaaatattgatttttggtttggaacattcagttaatcataataccaaacactgcaaggcagtccattcatttactttcccttttcatgaggaaatctgcacgaacagaaatgctgaatctgaggatttgagagtattggagagtcaaagtgggttgattaatctagtgacttttaaattatcggaggttcaaggacctcagataaaacttttcttatccattgaattgttgtataccacaatggcctttggattcagatgatccagagcttcttgactctatctagctgcatgatattttgccttgagtgacctattttatggtgttcttatgaagactaattaatatacataggtaaaatacttggatgtgggcttaacacatcttgttcaatatgttagctatagtcacaaaaagtataatctatttttcttataatctacattgccgttgcatgattagctaattatgcatgtgtgtctcaacaattgagtgttacctttctaaaacagttacctgagcaggcctgatcctaacatttgagagacaagagtacaaaaggagtcccacatgttacagatctcaatatttaaatactataaatcaagctaaaaaaatgttaatttaaatgtgttatatcttcctggcttaacaaatatgccttcataacaacgtagaagccagatttaaatttagagtacttaaattccagaacatagcaaagcaaggagacccagtctttgctcccctccccatccctttctctttctaccatggcctccagcacttgtgtggagactacaaagtccacaagtccaagctccatttacacctcccaccaacagtcttttttcaacccccactgggcccaggagccccatgagcagtgaattccaaggtcccagctatgcagagcaaggctcagaaggaggcaaagagctcaaggggtctttgttgcagaggagcagtgctgtccaggtgctgagaagttggagtgcagagtagcagagccctctaatatacagtgaccaggacagggacctgtcttgctaatttaagattattttctctgtcctgttttaagcacaagtgaagaacaattacctcttttttctcttccacttacaagtcatctttcttcacagaaaagtttataaagagttataaaagcaacaacatgattgttaagttacctggacagccacagacatttcctatttatcatgagaactgcagtaagaatatgcactgatctaagtatgatcttttaatatttagttaataataactttatcaaccaaagttaattgaaccaagaggctggtattcatggtgaactaaactcaaacatgactgttgggcttgctgaatgtaagatcattcagaaaagaaggctagacctgtgttggtgcctgatctatttccatattatacctcttgcttctgcttcattgtttctttcagattatacctttctaggattttctcttacctgagaaaatgggacctttctttcaaaattcctgccggtatataaggatcaggctgaaaatccacactcttcccaacatgtcactactggctccaagaggaaaatgtaccttctgtgtggggcacccacattgcaccttcaatgatgcacatcacagtgaacattagaccatgaaccttaagttaaactcccatgtcatagcaaatgtttcctatgggatgcaaagagagggatgagtggtattcaaccctgtttacccctaagtcctagggtaatgggcatttctgttgtctttttttggtttggtttggtttggttttggctttttagcacccatcacatctcttgtgtttctttcattggaaaggggtagtgggcctactaatcaaggcaccccccctcctatcccatgcccagtgggctgggtgtgggggaagaaccccaagcatagcagccagtggactgtggtcaagctctgaacaagtcattcttggctggagtctgtttccaaagtgcctgatatctagacctggaactgactagcttcatctgcttccaagctgttttggggggtgtgtgtgtgtgtgcgcgcgtgcgtgtgtttgggattccccatcccccgccacattcctggcaattcttttagctacctaatatccttctagtaaattccttttgctggagttaggcagagtttctttcatttgcatgcaatctaagagtcactgctgatacacttggcagagcccctgacacaagagataatcaatgaatgtttgttacataaatgaataattacaacctaaatgtatatcactgcttatttgtaaaatagtggattttttaattctgattcataaaacaacacatcattgactaatttttttttccaaggcagggcctcactctgtcgcccaggctggagtgcagtggtgcgatcttggctcactgcaacctccacttcatgggctcagacattccttccacctcagcctcctgagtagctgaaatcagaggcgtgcgccaccacgctcagctaacttttgtattttttgtagtgatggggttttgccatgttgctcagcctggtgtcaaactcctgagctcaagtgatccacccacctcgagttcccaaagtggtgagattacaggtgtgagccaccgtgcccggcctactacattttttaaaatttggaaaagtgtaacaaaataaaagccatccatatttccaccacccagagattgcctaactttttaattttgttctgtttttttaaatatacctgcatgatgttttcatttcacaaaacacatattaacaatacaatatatgtagtagtgcattttgtttttttccacttaaaattgtggtgaagtttgtttcacgtcattatataatcttcaaaataattaattttaatacctatataatagtctgttatcttgggaccttaaatacctttaccaagctcccaagttctagttatataggttctttttaatttttattactatgaaatatattataatacacaattttacctgcatctacttccttaccaaagacaaaagaaaacataaaataaaaaacaagaggaatagtgtgtcaaataatttaaacttttaaaagttttgacaactttcttttttttaatggtgacagagtatcactctgtcaccaagcctggagtgcagtaacgcgatctcggcttactgcaaactccacctctcaggttcaagtgattctcttgcctcagcctcccaagaagttgagattacaggagtgtgccaccacacccagctatttttttgtattttagtagagatggggttttcccatgttggccagggtggtctcaaactcctggcctcaagtgattcacctgccttggcctcccaaagtgctggtgttataggcatgagccaccgtgcctggcagacattttgataagtatttttaaacttctctgtaggaagcttgtattatgtaaccctcccaccacaagtaatgaaagagattgtccttctcactgcatccttgccagtattaagtttattttttgtattttttacttttttaatacataaaacacaccacctcattgttattttaatttgcatttctgtgattaatagtaataacatttattaaacgtgtgcattggtcttttattttttccttttgaattatgcattcagatatttggacaattctattggggtgctattgtttactcactgatttgcaagagttcctcagggctatcatgaactgtcatgtcatgtttggtgtcaatattgttttccatgattctgttctgtttaaaatgcatgcattgctgcatatgagagtttaaaatatattcaaatctttattttgctttgtgattcttcccattgattttatatttaaaaagtacttcccctaaaattagttaaatattttattctagctttgttttccaccttgcatataaacttatcaatttatgtggaatttcatttggagggtcatgtaaacagaggttcttagttgaatgctttctatacacttagccaatttccatgacgttttgtcaaatactcctcactgtttcataatgccttcttcgtcatatttctggttctaagaatgacctaaatctgtttccaggctcttctattccactgagctattaatcaattcttacaccagtactacattgctataatgattgtagccaatgatcaaatttacttttgtttcaacaatggcgcccattaccactaccacttccatctacctaccttcaccccccaaccacccacatctaccacccaccacccccatccataccacctcatcccaccaccttcatgtattcgtctccaccatcaaacttccccccacctttaccacccctagaactccactctccacaccacctgtatgtaccaccacctcccatcttaccaccaccactcacctcccccaccaccactactattcttttgaaaagttttcttttatttttatatggtgattcttccagatggatgttagaatcattttgtaaggttctcccaaatcccaatgtaataaaactatataattgatctgggaaaaataaccgtttcataatattcatctttctaccaaagcataaggtatgtctttctttgtttgctcctcagtttattggtttgagtaaaattgtatagctttccacaaagacttttatatatttcttattattcacgagtattttatgtatgtttcctgtttttcccactcaatttatatattagtgaattcatgaatagaatcattttccattctactttttagttagtaaaacactggcattttgggtggccatcaatttttgaacatgtattttataaccaaaaacattactgaaattttgtactagttcctttaggctttaattgatcccattgtgtatccatcacttttaaacaaaatcaaggcacactgtctaatttttggttacttacattaaaaactttacttaaacataggcattaaatgctattttactgtttatttttaaaaatcacccttttatgagactaatataaaaatctgaaattgaagccactttagaaatctaaaacataacatgtgttcctctgttgaactacattcatttcccttgggcactcagtcttactattcaaaactacaaaaagggctctgaatgagagacattaagtcacttctcacttggattaaacaggacaaatttagacaattaaacgaaataaaacaattcaggattttgacagaaacacaccaggaacttgtcgccttataaagagcaatttctctcctaatttacctccagagataatgtccaggatgatttttaaaataaaacagtgcccacctagatatggtgagaaagcaattgcatgctcttctatatatgtgcagatacctttttccccagataagcacacatttcctatttcaacagatcagaataataataccaacaaattattaattcacaaaatatttgttgtgctcctagtaagtgtggggttctgtgttattgggaaagattagagggttatagtgatgattatggacaggaattgaagagacactggcatataacagaagctcaacaaataattaaatgtattatttatttattattatacataatgattattatttattgtttaccattaatttccagaagactgaaagtctagctcaccattgtcttccaagggtgtagcatggcaaatatacacatgcaataaatatttgcagaatatttattgactgattgatgtatttttacaaaaacctcagttgccaaaaaaatattttgactcaattcttaacttctagcctaaatcagttcttaaaagatgcatttgttaaagccaagaatactctccttttgaagtcagaataaggttctaaattgctctttctatactagaaaagaaaaaccttctaaaaatcagatcttgaagttggcacaggaaaatgctatgaggcagagtattcgttccttcactcattcaccaaaagttcattgagcaccttctgcatataagacataaaataaatggccattatagagcttacagacatagccaaacaaacaggcatttgcaaactggaataagtgctgtggaataaaagtgaaaggatgatgagagagttgggtcggtggggaagagagatcaaggaagcccaagggatgagtatgacccagactggtaaaatatagagggaagatggttggggatgttccagaaacagacagagggtcagtgtgacagcatcaagaggaagagatgcacaagatgaggctggccaagtatcagaggctctaggagtctctggaatctgtcccaggtgtgtgggtggtattttatgtagggaactgacattatcctctctgctctggatgaaggattagaagagccaggcaaggaaccaggggtcttgttaggaagttattctagtggtccaggtaagagattatcatctcttgcagtttgatagtggtggtggtggggatagaaataatttatcaagatgtatttagagatctatagagaaaatagcatttataagactgcatgatggttttaaatgtggagggtcaagggaaaggaggtgtcaaaggtgattcttgggtttctggttaaagcaactcgatggatagtggtgccatttaccaggttaagaaggactagaaagttgttagcttgcctttgttgctattattgtttttgttatttaatgcattttggtttttttgcatttgtttggaaggttagcaagaaggatggaaggcaacatcaacaaatcaactgggggcacagtatgtttgagatactctagaagatccaggtcctgggttgtcttggctcccaggtaagtgacatgcataaatgaggtacttttgaaccctgctcttccctaccatggttgtgtatataaagcctcaaataggttagttcccttaaataatctttaaagtattttctgaatccatgctactctatctttacctcttatgctaacataatgttaatgttgtcatcaaacacagttcatagggatgttggtgtactgggctgaagagtgtctcccaagaattcatgcccatccagaacctgtgaatatgacgtttagaaatcaggcatttgcaaatgtaacctggttaatttgaggtcatattgaataaggaacaggtcctaaatccaatatgaatgatgtccgtataagaaaagggaaatttggacacagggacagagacagagaggaagatgccatgtgaatacagaggcagagattggagttatgctgccacaaaccagggaatgcctggggctaccagaagctggaaaaggcaagcaaggatcctcccttagaggttttggagggtgcatggccctgacaacatcttgattttggacctctagcctccagaaccatgagagaataaatttctgtggttttaagccacccagtttttggtaacttgttataactgccctaggaaactaatatagttgggaaatttaagggaattaacatgtttgagcctgaatcattatatagggcacatagcataggttcagtaaatatccatttccctcttactcataacagtcaccaccattttcctggtggtttaaattatgattaatccgtacatctactcatctagataagtcttactattccgaggactgttctataagtgaggaaactgaggcttaggaaagttaaataattttcccagaatcacaaagctaaacatagaagagtcagagttcaaacacctgcctcccatacctacagcatttcagcaggtcctgacagagtggagaggcactgccagactagattttcaatgcttagatatcaattgattcaatgcttagatatcaattttcaattaaactcacatttattaataaaataacaagctgcagagacctagtacaatctctacccactcacagaagaacactaggtttttagtctaaggccagcgttaccaaggaacttgccattggcttatattgcttccatttagcagtgcatctgccttgcacatatgtattccaagtcaaggtattatcagattggacatttatggctttaatttacttaaatgcattttccttatgtattcccccacttcattttgatgatactgactcattctcgccacctaacaagactataaaaataaatagtgtgagtgcagaggaaactgtctccaaacttcatatgctaagatgcccatcctttaaattataaagcaaaaaataaacccatgctttaaatttacctttctccctaactaacctggttatctttctccccaagattgagttgttgtgctgttgaatataacagatacacaaatctaaggtggcacagctgttattataaggtgtcaatttcatagaattctagtgtaggagggacttctaaaaagcatcttgtccatctatatcaggtaagagaaagagtgtctacagcctccaagccccagaagagaagcggttgcactagaagatttttgtgagttacctaagaccctgtggctatgtcttggtagaactccgtagaatgccaggtttcctgattttcctaaaagtgtgttcagtctttcaagctgtcatcaactattaacaatgacactttcctctggctttgtgccaacttttctttttgtttattattctggccataaaaagaccaccataaatagcctcagcgtttcaggttcccttaattgatatctaatgttgacaaattaactcagcccgagttgaaagctccatatacacacacatggtttcaagaagggcgatcgcgcttatcctccaaactgagcagtgatgatccctggacttctcaagtttaccctctaggaggctgacatggcacacaattttgacaagagtttggaaccaagatcctcttccacgccctgctcacaagggtgcccacaagcagaagttctctctctgtctctccattacaacccaccaggcgcgcgcgcacacacacacgcgcgcacacacacacacacacaaataacaaaggaaaacacagcctcataaaggctcagctattgcatcctccagtccacacctgccaaaagacaaaaaccatgcgggaatcctgctctggcaatatgtccaacacttctcgggaaaagcagcgccgtggcacccccagggcgtgcgctgctgtatacacacaaagaactggtgctgggcttgcgagcagttcggggtaccagcacgctctcagggctggaatccggggttctcctccacgccctcccgcccagcaaaatggaaccatcctttatttggttggtagagagcccaggctggatagtagcgcatgggttgagggtgggcggtcccctatccctaccctccaggcagcaggtccctagcctttgcatctcctaggagatgcaggatcgcgctgtcacagtggtcctcttcgcatcctctcccggcaaagagagatgctccggttaccagcggcgcgcatccccgcaggcgcctctcctctcgccgatacccacccaggcagtcccgacaggcgcgcctgcctacctggtggccggctgtcagcgaagcggcggtgcctcagccccttctcagctgctacagcgctcccagcgccatgttcccggtctccccgggcgcacgctggggaactactactggctgggtaggggcaaggggggcgggggccagcgggagggggtgagaggcagagccacagctttctactctccacccaaacctcccccagctactgagcatgcccagctgcccggcttcgcccctcggaggactgtccatgagcgtacgcagctgctccgggttttcgtggcagccggcgggaggcaggctgtagcggcggccgggggtggaggtgagggggagggtcggggggcgtgtctacactcagggtgcaggagccaggagccgggagctggagcaggcgaccaatccaatcacgtttactcccagtcgtccccggcgggggcagctcctgcacgccctctcccccaacactcgggatttgcagaaatgttgttcaggaccattgcaggattgagttttgcttaagaggctagcagaggtggggaggaggaggggctgagaagcagaacagtgggctggcctctttgccaccacctggaccggtgattctcaaactttcatgtgcctgtgaattaaaatgcagattcagattcaattggctgggtcctgagattctgcaagcctaacaacctcgcaggtgatgctgctgctgctggccctcccaccactccgagtagcaaacatctagagaaccccttatctgtgacctctcagtggccatccttcaatccgccagcctagcaatggtctctggtgtccacagagactcctccagcctggggttgctgagccttacctggaaggagtgtttgtggggctaggctgtgaccacccagcttctccttggctgctgtctgatttcgaatttaaggcccaggggaagaaggattcctggaccttttcatgctcactttgctagctggctagtaagccagttgctggatgagctgccccggtcaagtctgaaccagtctgccttggctgtccccttgcctttcctgagctgggacaaaaactcagactgggcatcaaagtgtttattgtacatctaatagcaagcttgggcttgcctagttaagaaagccgacagattatgacaaacatagagcgcatttttgtaccaagagatgtcaggcctttgtgttcagtgatgtttgggctgaagtttgcaacgatatttgtggttcaacttaaacttcccagttgcctactgccctcccagactcttgaagtctccagcattatcaagactctagtgaatgaaagacattcacgaagtagtcctgagttttcacccttggaaatgaagaagccacgctcttgtctgtcttcagctgccacaagagtacccttatgagctagtagtggatatggaatctgatcccataactagatagcaggttacaaaataaggatttgtatctctccgttccttattatactcaatgaccttagacagttttctagctaatagtatagtagttatcatttccccttgcttgttttccattcacttagtacctttaatattgtactggccatatcaaaacagaaaccacaggataaatggatgattacttttctccctcagtagtcccatgtccttgtgtatcatactcatctcttccttctcaaagctgcacacagccctaacaacctacccactgccaccatcgtcacccccacaactatatgcataaatattttctacttttgactttcttatatgtgtgctcacatagatgcaaaagccagaacatatttttactgagatatcgtttatttgtcattggttagtatcagttaaaatttttatttgaaatattgaactttaatcacttaaaatagccttcctgttatacataaagtttgtgtttgtacatttgtttctgctagttaaatatgatgatgattgttagctgcctcaaatttattttggaagcgtgcaaggtaaaaattatagatgaataataatgctatttctgtaaatactgcattgcatgaattcctaagggttttctttatatgtaatgccatttcttgagggtttagcctgcagtatttgactaaggaccaacatctgtgggtgggagggatacaggaagcaggagcaggcagaggtagaagctaagctgtgatgcaagccaattgcagcctttgtcagccccttatggagctcactagctagggtgatccttcagaatgaccatgagttggtctgagatagtcagtcctttacatccacatcaatcattgagcatgggctgttcctaggaggggcacgaacttaagacaggcagctctggcaattcttacaggtaacaacagctaaaggcctctgtcagctgtagtccctgtggctgcagtaacaaatccttcacttaaggggaatttaggcaaaacattcctttgtccaccacattgatgtatttattgaatacagcacttttgaacacacaaagtagaactctactgatttgtcagacagattttaaaactttatttttgaataagtaatagactttctctctggctcaaagatttaaaagttggaaaataacctgtaatcagccattgagagtatactatctatttaggtatctggctgtatgcattttttatatgactagtttaattatgatttattgagcaggcatgtatttattgtctaccatttaagacataattttctctgtcaaaatctgtatttgtaatttgtaatggggtaggaataagtgtttgatagtaaatagaagtgtgtttttcaataaaacagagctactgactagtcaagatttcatgagaaactaatgtcaaccaaccttgttgacaccaaaaactgtgacaagatgaacctgaggggtggagaacttggtagattggctgacagggatgtgtaagacagcatgctggaacccaggttcagactacccagctcattctctttaccttctccaggctatgcatctacaaatggctggaattcttgaaagatgaaccgcaaccataagggaaccagcatagattctagaaatgaagcaggacatttgctcagatagtggaggtagggaaagaataggaggtggaaaagaatgttccaaggaacataaacaaaagcatataaagaataggtctctaaagaattcccccaaggaaacagaaaaaaaagttcggacaaatattttttcccgagtttcaatggaatgaaaggcaatataatctgaataatgttttttaaaagcaccataaagaaatataaggatttaaagacagacaataagactaaaatgaaagataaactagcagagttcagggaaaaataaaagccattaaaccactcaaaaggtaagagactaagggccaggcgtggtggctcacgcctataatctcagcactttgggaggccaaggtgggcggatcactgaggtcaggagttcaagaccagcttggccaacatggtgaaacccatttctactacaaatacaaaaaaattagccgggcgtggtggtgggcgcctgtaatcccagctactcagaaggctgaggcagaagaatcacttgaacccgggaggcaaaggttgcagccgagattgcaccactgcactccagcctgggcgcaacagagggagactccgtcttacaaaaaaaaaaaaaaaaaaaagaaagaaagaaggaaagaaagaaagagagaataggaaaaaaaaacagactaaccactgaaaacacagtgataaatagacaagtacttagctactaacaaataagtataaaacaaatcatagaccatttttatgaaatacaaacaaaggagatccaacacatgtacaaccagtaacatgcaggagctggcttgcaccagcttgcaagagctgattgggcatacgtactgcttcctaactccattttcagtaacagcttgaaatcagccactgtggaagtatttaccccacacaaatggacaaatgctacaaatcagggttttgtttgtttgtttgttttcagacaactggttattacatatctaccagaataccactttttacaacctttgctgttaaaaaaaaaaagaataaaatggaagagaaaaaaataatcaaagatgtaatagaaacacaaaagttagtttcctgaaatagagagtgttagatcagcagaacaaaagaacacaattgtctcaggggaaaaaaaagaatcaacctggaacaattaaccctaaaatatatcctactgaagttacagaacttcaaagacaaataatgttctgaatatccagacagaaaaggcaatttacatataagaaaaagaaagtcagtgtgcatttagatttcttcactctcatcaagcaatgcctgagggtgttctgagggaaagaaagggtgacctaagaatgtttattttcctacactggtgttcttcagattttcaaggcaacagtcaattgttctcaaatgcaataaatcagtatacacagcagaaaaaaacctttataatattctacttcattatcaaatttatacaactaagagataaatttaaaacataaatctcatgaacgatgaagctgtggtcaaatgtgataatgataatcatatttattttaaaataaatctaagactaaaccactggtgtttggcagttttaaatcagaacataaatataaaccttgacaatgtcagtatcattggataacttactaaaatctgaaggtagaaagaagggagttgtaaggaggtttaagtataatgatttcctcagcaagtggtcaatgtatattattaaagttgccgcagatagatagaaaaccccacctctgatctcatcatgcttttttcttacctttaagggaatatgtttcaaacttatctctctatatgaaaaaaaaccgttttctgaagttgagagattactgcaggcacattttagcttcttttcttatttaattttaataagattaaatacaatttagttttaaagtagcttctgtgctatcatccacatatggatgatacttgaaaaagtatatctgtcaacttatcctacttgttataaccttatatttttatctctttctatacaggaagatttatggaatattataaaccaagggatttttttgatgaaaagattttgggttgattgtttacttctctgtattccttaaaattgcttgaaattttagacaataaatgcatgtgttttaaaaagaagccattattctcttcaaaatatcccaaaatattattctcttttaaacatattaaaattttacagaaagctgggtgcagggatacacacctatagtcccatctacccaggagactgaggtgggaggatcacttaaacccatgagttcagtgccagcctgaaaaacaaagaccttgttcctaaaaataattttttaattaaaaaaaagccttacagagtatgaaaatggaatgaaaacagataactaaaataagtctggattaaaattattcgtttagacaaaaatgaagagaagacacaaatcaccagcattgggaataaaataggtactgaaactgcagatctcgaagtcattaaaaggataatttaagtaaatatttggaaaaactttgtgttcataaattcaaccacttacagtaaataaacaatttctgaaaaccacacactaacaaaaactcaagtaagatgaaatacgtaagctgaatagtcctggaaccactgatgaaaatggaatacataacttaaaaagctccccaaaatgaaatatccagagacttaaacttgaaaaataacctgtaatcagcaattgagagtatgttatctatttaggtatctggctataaactttttttaatatgaagtgtttaattataatttagtgagagtgttttactggagaagtctactggaagaagaattaatgtcattttttcacaattttcttaagaaaacagaagagaacacttcccaaatcatttgatgaaacaactcttaccctgataacaaaaccaaacaaattcagtaggaaagaaaacaaaactataaacaaatattttctgcttcccagcttcaagcgattctcttgcttcagcctcccgagtagctgggattacagacatgtgctaccacttagatgcaaaaatcctgaaaaaaaagataccaaactgagtcttacaatgtataaaagtaattatactttgtcaagtggtgcttctctccagaatggagggcagatttaatatggaaaaataatgtaattcaccataataaaaaatgaaaaagaaaaaagtaatatgatcacatcaattgatgcagaaaaaaatttgacaaaacccaacacatgtttatgaataaaaactttcagcaagttaggactagaggggaattacctcaacttgataaaaagcaactacaaaaaacctctgactaacatcaaacttacaggtgaaaagattgaatgctttccccctaagaggcagaacaaggcaagcctgactattcttaccaatcttactcaatatagtaatggaaattctagctgaattctagctcactgaaatgaggcaagaaaaataactgtctctatttgcagatgacatgattgtctaggaatcaaatgccaaagaatctaacaaataactcttagaaataataaatgagttctgcaaatttgcagcatacaagatcaacacacacgcaaaattttattctgtgtactaatcatgaacatacagaaaataaaatttaaaacacaatgccgtttacaattgctccaaagaaaatgaaatacttaggtttaaacttaacaaaatatatacagtatctgtatgctgacaatgacgattacaaaatacaaatgaaataagtcaaagtagacctaagtaaatggagaggcatactatattcatagattagaagactcagcatagcaaaggtatcaattttccctaaattgatctatataatcactgaaatttctataaaatagtcagtatattttttatagatatagacaagtttattctaaaatttatatggaaaggtatgggtctagaatagctaaacaatttgttcaagaagaataaggtgggaggaattgccctatccaaacattaagatttactctatagctgcagtaatcatgacagcatagtattagcagagtgctagacacatagatcaatggaattgaatagagaacccagaaatagaccaatataaatatgaacaaccaatttttgacaaaagtgaaaaaacaatttcttggagtaagatagattttcagcaaatggtgctacaacaattgaacatatataggcaaaaacacacacacacaagaaaaaaacaaacaaaaaacataacttcctcacagctaaaatcaatggtgaaagactgaaagcttttcctctaagatcaggacaaagacaaaaatgcccacgtttaccactgctattctatatagtattggaagtgctagccagagaaatcagacaaaaataaaaataaaaataaaaaagaagaaacatccaaatttgaaaataagaatcaaaattacctttgtttgcagatgacatgatctctgtagaaaaccctaacaagtccatacacacacacacacatacacacctgttagaactaatattaaattcaacccgattgcaggatacaatataaacacacaaaaatcagttgcatttctatatagtagcactgaacaatctcaaaaggaaattaggaaaacaattttatttacaatggcattaaaaagaatacaatgcttagaaattaacttcaccaaagaggtgaaagacttgtacactgaaaataacaaaacacttttttttttcttttttttttttgagaccagagtctccctctattgcctaggctggagtgcagtggcaccgtctctactcactgcaacttccgcctcccaagttcaagcaattctcttgcttcagcctcccaagtagctgggattacaggcgtgtgctaccacaccctgctaatctgtgtgtgtgtgtgtgtgtgtgtgtgtgtgtgtgtgtgtgtgttttagtagagacggggtttcaccatgttggccagactggtatggaactcctgtcctcaggtgatccacccgcctcggcctcccaaagtgctaggattacaggcgtgagccaccatgcctggctcaaaatacttcttaacaaattaaagcagactgatacggtttggatttgtgttcccacccaaatctcatgtcgaattaaaatccccggtgttagaggaggggcctggtaggaggtgactggattatgggagtggatttccctcttgttcttctcatgatagtgagtgaaatctgtttttttgttttgttttgtttttgttttttataagtgtgtagcacctccccattcactccgttccttctgctctggtcgtgtaagatgtgcctccttcctctttgccttccaccatgattgtaagtttcctgaggcctccccagccatgcttcctatacagcctgtggaattatgagccaattaaacctcttttttaaataaattacccagtctcaggtaattatttatagcactgcaagaatggactaatacacagacataaataaatagaaagacatcccatgttcatagattggaagacctaatattgttaagatatcaatactacctaaagcagtccacagattccatgcaatccctagcaaaatccaaatgtttttgcagcagaagaaagatctatcctaaaatttatatggaatctcaagcgacttggaatagccaaaacaaccttgaaaaagaagaacaaagttaaagactaacttttttatttcgaagctctctacaaagcaacaataatcaaaagagtatggtattggcattaaatcacagactgatgaaatagaatagagatcccagaaataaacccttgcatattgtcaaatgattcttgacaaagttgccaagaccattcaggatggggaaagaacagtctttttaacaaatggcactgggaaaactgagcatccacttgcaaaaagtgaagatgggccctttgttacctaacatcatatacagaaattagctacatttttaccaaagatgtaaacataagtgccaaaaccattaaactcttagaagaaaacataaaggaaaacctacacaacattggatttagcagtaatttctaacatgacaccaaaagtataggataaaaaagaaaaattagataagttggactacataagatttaaaacttctgtgcaaaagacacaatcagacacaatcaacagactgaaaaggcatcccatagtatggaaaaaaatatttgtaaatcatatatctggtaaggaatcaatatccagaagatagaaagaactcctaaaactcaacaacaattaaaaactctttaacataaaataggcaaataacttgtatgacatttctccaaagaagacataaaataagcacatgatatgaagcttaacgtcactaatcagagaaatgcaagtcaaaaccacaaataccatctctcacttattagcatggctagttaaaaaacacagaaaatagcagatgttggcaaggatgtggagaaattagaacccttgtgaactgctggtgagaatgtagaatggtacagcttctatagaaaacactattacagtttttaaaaaataaacatagaattaacatagaatctaacaattccacttctgggtatacacccaaaagaactgaaagcaaggacttgaacaaatatttgtacctcaatgtttattgcagcattatttgcaatagccaaaagatggaaacaacccaaccatcaacagatgaatgaaaaacaaaatgtggtatacacatggaaggggatatttttcatccttgaaaagaatggaattctgatacatgtgacaaaatggataaaccttgaagccatgatgctaagtgagctaaacacagaaggataaatattgtataattccacttagatgaggtgtctagaatagtcaaattcatagatacaagaagtagactagtggctaccagaggctagggaaagggaggaatgccgagttattgcttaatagatacagagtttcagtttgaaatggttaaaaagttgtggtgatggatagtggtcatggttgcaaaagaaggggagtgtacttaatgccattaaactgtacccttaaaaacggttacaatgttaaattttatgttatgaatattttgctataataaaaacaaatcttcaacctaaacctcataccttacacaaaaattaactcaaaatgggcttagatgtaaaacataacactcttaaaaaatagcagaaaatcttcaagatctaagtctcggaaagagttcttagacctgacaccaaaaccatgatctataaaaattaagattgataaattagacctcatcaaaattaaaaacatattctctgtgaaagaccatgtgaagaggatgaacaaacaaggtacaaactggaagaaaatactttcaaactacctatccgacatacggggtatataaagaactctcaaaactcaacagaaaaagaaatctaaatggaaaacggttaagagacaagagcagacatttcaccaaagagaatatacagatggcaaataggcacacaaaaggatgttcaatgtcattaaacattagggaaactcaaattgaaaccacaatgagatgtcactagacacctatcagactggctgaaatagaaaatagtgacaacaccaaatgctggtgaggatgcagagaaactatataaatcattcgttgatagtgggaatgtaaaatggtacagctactctgaaaaacactttggtagtttcttacaaaactaaatatattgttatcatatcatccagcaattacatttctgggcattgttatggggtgaatacttgcatccccctaaaattcatatattgaaatcctacatgccagtttgatggtattaggagatggggtctttgggaaataattaagattagatgaggtcatgaaggtgaagaaagaatttgtgtccttatgtaagtgccgagagagagagctgctttccctttcctccatgtgagattccagagagaagaccactgtacttagaccctcaccagacactgaatctgctggtgctttcatctaggacttgccagactccagaactgtgagaaataaatgtatgttgtttgtatcttttgttataagtttgtggtcttttgttataatagcctgaatgaactaagacagacactcctctcagagaagtgaaaactgaaaactcactttcacacagaaacatgaacaagaattgtcatagcagctttatttgttatagccaaaaattggagacagcctacatatccttcaataggtaaatagttaaataaaatgtggtacatattaatacataccatgaaatagtactcagcaataaaaagaagtgattgatttgtgccacatcatggattataaatctgcagggaattatgcttagtgaacaataccctaaaaggttatatactatctatataacatttttgaaaagacaaaattttatgaatgtagaacagactggtagttgtcggggttaaggagggaatgagaggtgcaggaggaaggtggatgttgttataaaatagcgacaggaggtatcttgtggtgatagaactaagtcttgactgtgatggtgactgtatgaactacacatgggttgtaattatataactacacagagagagagagaaacacatacctacatacatatacatatacatatacataaaatacatatgcatatataaaaatagccgggtgtggtggtgcgcacctgtacatatgtgtatatgtatgtgtgtgtatgtgtgtgtgtatatatgtatgtgtgtgtatgtgtgtgtgtatatatgtatttatgtattatgtatttctctctctgtgtgtagttaattatatatatgtgtgtgtgtatatatacatatatgttatatatatagatctatacatatatatgtaatatatattttatatatagagagagagagagacagagagagagaaatgagtacaagcaaaaccagagatatctaagtaagattactgaattgcatcaatgtcaagatcctggttgtgatagtgtactatagttttgcaagatgctggggaaagctagattaagaatacactgctctttcttcaagatcctggttgtgatagtgtactatagttttgcaagatgttggggaaagctagattaagaatacactgctctttctgcatttcttacaactacatgggaatctacaattatctcaaaaagaatttcaattacaaagtaattcatggccaggtgcagtggctcacgcctgtaatcccaacactttgggaggccgaggtgggtggatctcttgaggccaggagtttgagaccagcctggccaacatggtgaaaccctgtctctactaaaaatacaaaaattagccaggcatggtggtgggcccctgtaatcccagctattcaggaggctaatgcaggagaatctcttgaagccgggaggcagaggttgctgtgagccaagatcacaccactgcactccagtctgggcaacaggctcaataaaataaaataaaataaaataaaaaataaaaataaaaataaaaaaattagccaggggtggtggcgcatgcctgtaatcccagctacttgtgtggctgaggcacaagaattacttgaacctagaaggtggaggttgcagtgagccgagatcatcctgggcaatagagcaaaactctgtctcaaaacaaacaaacacaagtaattcatatatccttaacttaccttaccaacatttactgagcacttcctatgtcaatgctgtcccacagaactttctgtgacaatggaaatgttctatatattcattggataatacagtagccactagccatgtgtggctactaagcacttgaaatgtaactagtgtgactgagaaactgaatttttaattttatttaatttaagtctaaatagccacatgtagctaatggccaccatgttgggcagcacagtcctataagtcaattactaagataggtattggcaaccctaaaatgaacatagccttccggaaactaaaagtctatttaaaggaggctaataaacatatcaatattataaaccatatgccagagtaggattgctcatatttattttatgtctcaaagatgagacacctgacctagctggagttaaaggtgtgagaaaatccttgcaaaatgaaatatcctgagctgagtcttccaggcagttaatgtaagccaggtgagttaaagcctcttgactttggtgatttgggagaaatactgtcccaggtacaggaaacaggatttataaaggcacatggacatgaaaggacattcaggaaaggcaagtttttggtaagccagggcagagtcaatgagtatagagagatagggaggggctggatggtgaacgcctcagatgccgtgccttagcacttcaatttcatcatgaagattatagacaacatcgaagtgttttaagaacaacataagtaggttgacatctttaaaatatcacttgcaggctgggcacagtggctcaaatctgtaatcctagcactgtgggagactgaggaacgggaattgcttgagcccagtagttcaaggccaacctgggcaatgtggccagagcctgtctacaaaaattttttagaaagacattagctgggtgtggtggggtgcggctataatcccaggtacttgggcagctgaggccagagtagcttgagcccaggaatttgaggttgcagtgagctatgatcatgccactgttctccagcctaggcaagagagcaaggtcctgtctcaaaaataaataaaataaaataaaataaaataaaataaaataaaataaaataaaataaaataaaataaaataaaataccacttgcctctcaatggattagatacagcaagactccagttagggagctacaggtgtagcttctgagaagaatacctaacggctcaaataaggcagtggaagttggagtgggaagaagggaatagatttaataaacattaaagaggtagaatcaggaagatatatccaaatggatgtagatgatagggtcacaagtaatatacttggagatagcttccaagcatttgactgggatagctgctagatggtggtgctgtaggggcagagacagttaatgaaagagaaagagtgggtttggagtagaatatgtaggactttacttttttaacatgttgagattgagtggcctgagaaacgcccaaagtctcagaccagtcaaggaggcattaagaagcacaaatctggggccaggcaaggaagtgtggaagacatgctagtgtgggtgctacctgaaaccatacatagagttaagattgcccaggaaaactgcatcaaatgagaatggcccaagaatgtaactcaagcaagcaccaacatgaaaggagtgggtggaggaagaagtgaccataaggacactgagaaagagctgagagaggggacatgaagaaaaccaggagcagcctagagaaggccagtgggtcagctgctgtcctgagcagggaagagtcagtccactttcacaaatactcatacagttctccttttctttctagcctgagagatagcaaaattaaaacattttgaggcgaggtatggtggctcatgcgtgtagtcctaactacgagggaggcttaggtgggaggatctcttgaagccaggagttccagaccagcttggggaaccctgtctctacaaaacaaaaatttttaaaaaatagccaggtgtggtggtgctcacctgtagtcccagctactcaggaggctgaggtgggaggatctcttgagcccaggtattcaaggctgcagtgagccatgatggtgccactgtgctccagcttggggacatagtgagaccctgtctcttaaacacacacacatacacacaatattttggtatcagcacatgaaattggcagacatcagtagaacagaggagtctagaaataaacccaaatacgtttgagaatttcgtttataataaaggtggctttataaatcagtgaagaaaaaaatatatttgtatgggttaaagattatagctaaagttctgtagaattgagcttaagtacctgtggccttaagcaacagtaaattactttatcccatttggtgagctctatcctctttctgaaagggaaataaacccatgtaactttaaggccatggacttcagtgggagtcagtaaaatctccggatgaaatccccttgaacgatttgggtcaaacttcactccggaacaaggttaggaattctgaatgagattgccagatattgaaaaattttaaacattcactgcttacatatcatagctcagaaatatcacagctcagaaagtacatgttgtgccagacaagcaattaagagcttttgttgtgtaagttgttaatacacaagtgtacttcatagcttctaacctgctaaaatcccagcatgctgaggaatatcagtactagacatttttttctctaagaagaaaaacatcatcatcaacactgccatgtaaaggctgtcccctaatgtgtctccaaaccatggtttaattttgagtagaagggtagaaaataaagtacaacctcatctaccaatggtgtatccagagtatcttcatcattgtccctaggccatgctcagttgatgaaaaattaagactcacttgtcatttagtaaagctgtcatcatcaagaacagcatggattcatgtggagggtttgtagggcaccactctttgttttgcacaggtgtagtgattttaagagaatcagagagttgatgggagatttgaagaaggtatcacatactcacattaaaaaaaaaaaacaggctctctgcccattaaattcatcctattctcattttaacttgtttttcttttaaagcacatcctcactgatgccacctaaagccttagttgcctcttggaggggaatgtaaaaggctcccctttttctggaaaacccaactcaatcttatgaagatccatcagaatcttatgaagatctaagaaggatttattcagaagagacagatgagagagtattgcgctttcttttcagtatctggtgttgggaggtaaagcaaaagctattgccaggatgaaaagccaggactgtatggccatctatgccaggtagaatatagcagggagactatttttaccatgacagggacaaacttttatttttgtaagatgggccacaaacataacattggaaatgtttctaaggataataaggacagtcattttcttctgagaacattatgatctatacagcaataaatttaaaatatattaaagagagagaggaagtgagagggaaagggagaaagactcagagtgagaaggggcaagtttgagacggagtaatatttagcagctgtttggccttggtcatggtcacttatgctttctaagctagtttccttatctgcaaaatatagatgtcagttatgcttttttcatggagttgttttatcaaaggaaggttccataaggcagaggagatgtcctacaatcaaagctcaaaggcctggctcagagtctttactcaatgattttgaatgaatgtctaaaagagtagttatcagatttctgtgcatcaaaatcatctgggaggtttatttaaaataatagtgtctggctgtattggatgtctaccaattcagagtgaaacctgggcctctcacggcccctgagtgcttctaaagcacaaatttgatgtggcagatgccctggcataccacctagataccccttcaaggaaggatttgttttcttgcccctgggaatgtggctggcaggcagcctttagctctcaagtctgcttcctcttcttccatccttaggggttgtgtcccaagggcacttcctaatacacatctcaaacactaaactctgtctctaagtctgctttctgcacaacccatcctgctacatttgggaaatatgaacctgaaaaccagatttaattatgttcttcatcatcctaaaaaaccttcttaggtcttcattgactgcagaatcctttgcatgaacgttaaggctcttcatgatttgataccaatctttctttccttcctcatttccttgttaagtgtttctaaatccccaagccagaaaaaaatggactattttctacttaaccaagcatcttcacgatggaagcttttgcttaagcgttcccctgacatgaacttactcttcttttccctgttaaaatcctattggttcacgaaggttcctttcaggtgctacctgaacgatgagatctttcttaattctccagtttcacgctagcctcattcccttgctataagttgtggtgttttggtgccctgctcaccaaacttagcttctcaaaaccagaaatcctgttttccagcattcttttccccatatcactcagcctaacaccttagttatagtggatacacagacttttgttggattagtcagtggtactgaggcagtaatttattaaaacacaaacttgtactgctagaaaaaacccatagactatatcattgacactattgcctgcatttagtgcacagataagaaagcagaaggttaaaaaacttgtttaaggctgtataatcaataagtagtaaaatggtggcataacttagatctgactttttattgcatatatattttaatgttcaattttaaaattataaacataacacataaacatttaaaaccactctgccatgatactgtagtgatggatgcaaatcatgataaatttgtccaaatccatagaatgtacaataccaagagtgaaccctaatgtaaactatgaatttggggtgataataatgtgtcagggtaggttcattgattttaacaaatgtaccactctggtgagggatgttgataatgggaggactgtgcatatgttggggaagtgggtatatgagaaatctctgcatgttctgctcagtattgctgtgaacctaaaacttctctaaaaataaagtctattaaaaatcattgttggtaatttttaatgcagaatatgcaatcaattaaattcctataaaggtttacatctgaatcataaatttgtttctaatttggttatttggtcacttcaaacatattaaagaatagccaaaacatccgaacacaatcttttgttttaacaaaattactaccacatgcctacttaaacatattctgaaactcaacatcacaaatttaattgactttctctttgtcttcacatcactttaataattattagatttagagtaacctctgttttttgatattacccaaaggcttcccaaaattattttgataacttcccagggtttcaataatctcacaggaacctgggaaaaaagcatttatcttcccgaacaagctctaagtgatggttctgaattactagtatatgaataattttttaaaatagtgttttcagtattatctgcattcataaccacaaactaaacacacccatacaatcagtcccagagcaaagaagatagccttacaagtgaacagaaggagtttatgcagtggatgtgtttcactcaatttttgtttatctctgtagccatggcaatgactcttggtcaactctgagaattaagctactggaatgtttacatactgactgtctaatgacactaatctatatgctcaaagtagtgggtcaagatgaaccaagttatcagcatgtttacagtaaacatgaaggtctgtgatgtgcacccaggacctggtgtaggatttgcaccatggctgattacatgaaaggaatgtgaccaactccatttaagaactttggatcacaagattcaagcaagcactcttgggcatggtcatctcacacagatccctgcagtttacagctggagatgtatccagagttcctcagagaaggaggacaagaaaccttgctgttaaccttctagcctgtgcctgtatagtatcttttttctgttattcctgcatgcatcctttgctataataaatcttaaccatgcctataacattatgttgaattttattagtccttccagcaaattcccaaactagtgaatggtcgaagaattactgaaataactaacacttcagaagcaccccctcttgttcccttgaaatcattaccttcttccaagaataactaccatcctgacttctggcagcatagagtagttttgccgtttttgaacggatgtatttagaatcatacagtctgtattttagtatctgacttctttcactcaaatactatgtttatgagagtcatacatgttgcggtgtgcaactgtagttcattcattttcattatggtagaacagtccattgactatagcacaatttatgcgaaacattcctctgtggatggatgtttcggttgtccccagtttgggattattattgatattgttgctacattatgttctagttcatgtcttttgataaacccatgaatgcacttctgtctgctatatacccagaagttctttgaaaccaacgagaacaaagacacaacataccagaatctctgggacgcattcaaagcagtgtgtagagggaaatttataccactaaatgcccacaagagaaagcaggaaagatccaaaattgacaccctaacatcacaattaaaagaactagaaaagcaagagcaaacacattcaaaagctagcagaaggcaagaaataactaaaatcagagcagaactgaaggaaatagagacacaaaaaacccttcaaaaaatcaatgaatccaggagctggttttttgaaaggatcaacaaaattgatagaccgctagcaagactaataaagaaaaaaagagagaagaatcaaatagacacaataaaaaatgataaaggggatatcaccaccaatcccacagaaatacaaactaccatcagagaatactacaaacacctctacgcaaaaaaactagaaaatctagaagaaatggatacattcctcgacacatacactctcccaagactaaaccaggaagaagttgaatctctgaatagaccaataacaggagctgaaattgtggcaatattcaatagtttaccaaccaaaaagagtccaggaccagatggattcacagccgaattctaccagaggtacaaggaggaactggtaccattccttctgaaaatattccaatcaatagaaaaagagggaatcctccctaactcattttatgaggccagcatcattctgataccaaagccaggcagagacacaaccaaaaaagagaattttagaccaatatccttgatgaacattgatgcaaaaatcctcaataaaatactggcaaaccgaatccagcagcacatcaaaaagcttatccaccatgatcaggtgggcttcatccctggaatgcaaggctggttcaatatacgcaaatcaataaatgtaatccagcatataaacagagccaaagacaaaaaccacatgattatctcaatagatgcagaaaaagcctttgacaaaattcaacaacccttcatgctaaaaactctcaataaattaggtattgatgggacgtatttcaaaataataagagctatctatgacaaacccacagccaatatcatactgaatgggcaaaaactggaagcattccctttgaaaactggcacaagacagggatgccctctctcaccgctcctattcaacatagtgttggaagttctggccagggcaatcaggcaggagaaggaaataaagggtattcaattaggaaaagaggaagtcaaattgtccctgtttgcagacgacatgattgtttatctagaaaaccccatcatctcagcccaaaatctccttaagctgataagcaacttcagcaaagtctcaggatacaaaatcaatgtacaaaaatcacaagcattcctatacaccaacaacagacaaacagagagccaaatcatgagtgaactcccattcacaattgcttcaaagagaataaaatacctaggaatccaacttacaagggatgtgaaggacctcttcaaggagaactacaaaccactgctcaaggaaataaaagaggatacaaacaaatggaagaacattccatgctcatgggtaggaagaatcaatatcgtgaaaatggccatactgcccaaggtaatttacagattcaatgccatccccatcaagctaccaatgactttcttcacagaattggaaaaaactactttaaagttcatatggaaccaaaaaagagcccgcatcgccaagtcaatcctaagccaaaagaacaaagctggaggcatcacactacctgacttcaaactatactacaaggctacagtaaccaaaacagcatggtactggtaccaaaacagagatatagatcaatggaacagaacagagccctcagaaataacgccacatacctacaactatctgatctttgacaaacctgagaaaaacaagcaatggggaaaggattccctatttaataaatggtgctgggaaaactggctagccatatgtagaaagctgaaactggatcccttccttacaccttatacaaaaatcaattcaagatggattaaagatttaaacgttagacctaaaaccataaaaaccctagaagaaaacctaggcagtaccattcaggacataggcgtgggcaaggacttcatgtccaaaacaccaaaagcaatggcaacaaaagccaaaattgacaaatgggatctaattaaactaaagagcttctgcacagcaaaagaaactaccatcagagtgaacaggcaacctacaacatgggagaaaattttcgcaacctactcatctgacaaaaggctaatatccagaatctacaatgaactcaaacaaatttacaagaaaaaaacaaacaaccccatcaaaaagtgggcgaaggacatgaacagacacttctcaaaagaagacatttatgcagccaaaaaacacatgaaaaaatgctcatcatcactggccatcagagaaatgcaaatcaaaaccactatgagatatcatctcacaccagttagaatggcaatcattaaaaagtcaggaaacaacaggtgctggagaggatgtggagaaataggaacacttttacactgttggtgggactgtaaactagttcaaccattgtggaagtcagtgtggcgattcctcagggatctagaactagaaataccatttgacccagccatcccattactgggtatatacccaaaggactataaatcatgctgctataaagacacatgcacacatatgtttattgcggcattattcacaatagcaaagacttggaaccaacccaaatgtccaacaatgatagactggatcaagaaaatgtggcacatatacaccatggaatactatgcagccataaaaaataatgagttcatgtcctttgtagggacatggatgaaattggaaaccatcattctcagtaaactatcgcaagaacaaaaaaccaaacaccgcatattctcactcataggtgggaattgaacaatgagatcacatggacacaggaaggggaatatcacactctggggactgtggtggggaggggggaggggggagggatagtattgggagatatatctaatgctagatgatgagttagtgggtgcagcgcaccagcatggcacatgtatacatatgtaactaacctgcacaatgtgcacatgtaccctaaaacttaaagtataattaaaaaaaataaaaataaaaaaataaaaaaatttaaaaaaaaaaataacaaagagcatgctagcaagtcagtcaccactcttatctcaatcccagtggagaactctgcgagcaagtgtagaacaaatgcctctgagttaattcactcaaagaacaaaggagctggggtgtttatacatggtctcctgtcagtcattgtttcagggcttctcctgagttgggaggtgtgtgttaattttccagcacatctctcctgcccctctcttaagaagagcattttctgcttccaaatcaagcaaacattaacaggtgctggcaggtgaagtcagattttttggtgctgaattacataagttcaggttagtagatagaatgtggaaggggaacttgaaaaagaaaagtatctttaaggttaaaataacgtgcatacaacttcattttcttttaaatttttctttatgttaaaagttcttgactacctaatgatagtactaaaagagttaatgctcttgaacatttccattgcacttatatatatcactatttgggccttagttggaaatgacatctgctagaatcatcttttattagtaggacactatccaattttttaaaaacatacataataggccctgggtaatagagaatcccaaaataataaggctattatttctaaaaatagaaattattgaataggtcttctgggtgtcaatccagagttaagatggtgctccatggtgtaaaagacccaaggactgttatcttgctccgtcaggcatggcttttattctcagacttacactctaggatggctgctggagctccaaccaatccagtctctcatgacggcctaaaggaaggtgggaggattgaagcagagatgcaatgcacttctcagaaactgcacaccctacctctgcttgtatcccattgccaaacacttggtcacatgaccagacccagttgcaagggaggctggaaaaaatctttattccaattggccacatgcccaactgaaaaggaagctttactactgaataagaagggggaaagatatttggggcaacagtcactctcctttctcacaagtcaaaaaaaaaatgggaatttttttaaaaaaatctaaaatgtaagtaacctctaacaaagttttagcttaaagcagtcattaccgggacataaaagaaaataagtgttttccttggactcttcctgaacttaggttagaatgttatcaacttaaaaaacaaatatgttaaatttacaaacagtatggacctattccagagaagtggagggggtgctgtatgtatgtctgtgaatatgtgtaagttagaaacctagagagttctttctttttgatcccagccatgttatagagatggtgatacaattttaacctatgtgaaaaagcaataatataaatatgtactttgagtgcataaataaaaattctcaaacatgaatttgtttttataggtcttatttctcatcagcatggtattccaattcaagccatttgtttggttcctcaatctgcaatgttcaagtcataataatatcataagcatatttaagtcttataattaccagaaacataaatagtccctcaggaaactgaattaaagatttttgaaagagaataggagagacattttcaaggtaggctttcctaaccaccataagaaacacacccaaggaaaaaaccgaccattggcattggcattgctcatcaatgcacagatgtatttcgcggttaaaaataaaaccacaggtctcttcacaagaaagatgggtagaaaacaaaaaaattgtgattctccttggatgattgtgatggataatcagagacacagcttttcatgttgattggtctcgtctttctggagaccagaaatggaatccatctggacgcttgctaaaagacagcagacggagttataccacatgacacagagcagttttctctatcgtaatccaccaatggtgttctttgcaagtataatattactggagacctgaaagataattttccactcatgatttagctccagatttcttatggctgtggatcctccatgttaggagagaaagtttcttaaatatccgcagtactttccttttttaaatttggaaaacaaagagagacacactagcatgactctgtacctggaaaggtttcagaacaattcatgaaagcctcatttgtagccatcttgaaaataagtgtatgttaatgagcaataacaataagttttaaaaagttaattattatgccacaaaagcaaataaactgtctcaatcataaaatatgtcagttattacatataaaatgtaaaaatacttgacttcatgtatttgcaactatcttctagctcaaatctttatccttttagacccgaaatctatatttacttcagtcttgaggacctagtttgtattttttccttcattatatcccttttcatctacttctgtccttatcatttttaatactggtttgccactcctctgtttcctcgacttccatcccaccctatattacatacttacctaataagtcttcctactatcatttttctaggtctccaaattagtttcctctaactcttacaaaagaacatttttatccaccatatttcccattctcccaaggaggatatttcaagttaagatttccatttacttcaccaaatcccttaatctttcttttgaaacatcctttctgtgctgattgaaagggccacgtgatgttttattcacgcattcaacaagattttttaaatgcatgcaattatttagttatatccttaaatgagaggctgaggcagaaggaccgcttaagtccaggagttcaaggctgcagtgagctatgatcacatcattgcaccccagtttggtaacagagtctcaaaaaagggcatggaataaatccatgacagcaaagtcactattagatgcacacaaataaacacagagcccggatctctgtgaaaaacagagctttactttttttttaatcaagtttctcattggtctctccagggttcatgttaggtgcatgttaggtggtctccctcattcatactttgtttcctggacccctccatgggtttttccctctggaccacctaccaccaggatctcacttctccgtcactaggttctttctggtcctgcatccatcccatagagatgaatctttattaggtcatttatatactgcagaacttctgggcagctttcaggtcctccagttctctcccagaaaaatgcctccaagatcaagaaaatgatctcttgttaatatatatcaactcttaaagcatagcttatggacaattttatgctaaagaaagatctcttcccagaaagggtgaaagagaaaacaaaacaccttcagaatgcattagcaacatatatgagaatgaccatatgggctgggtatggtggctcatgcctgtgatgccagcactttgagaggctgaggcaggaggattgcttgagctcaggagtttgagaccagcctgggcaacatagcgagaccttgtctctacatctttttagaaaaaagagacaatgaccacatcctacacacccacagccttctaatttgctatatttactctccctagaattagataatctgctttatttttatcctgttaccacattgttggagaatgttaaagaggcaagtatattagactcattgcaagtttctgttctgtaatctcaccaatgttagggcagaacagcaaagctatcctatacgagagctcgtgcatgattccccttcatgtgtcctttttgtttccccagaagctatgttcctttcccccacagactattcctgtttctcacagtgataaatataaaattcacaggcttgcgttcattggcttatcttccttggcatcaaggaggctaaagtgtagacaaggagactaactttaataatcagtaatttaaatgtaaaaattacaatggtggaaaaaaatagagttatataattctataagggccagtagaagagagatttaacctaatgaaggatgtttggaaaatttttagagaatgtaactctgaaccggagaactgaagacagggtaggcattaactagacaaggggtcatgggaggggaagattgcagggaaagacttttctaagaaagtccacatcccttggtgtaagggagcagaaaacctacaggaattgaatgtaagaaggagtagagagctggcaagtttaaagcaaaagagagtgtggtttaaggggaagctggaaatgtggagagtgggggtagtccagaccatgtaaaatcttgcaggctgtgttaaggagtgttggctgtaatgtaagacagatggaaagccattgaagggttttaagcagggtgtgggatgtaaaaaattagacttagctttgagaagtttgctttggggatgctaagtggagaaagaattggaagaaaataaaaatgaatagagaagccagttaggaggtctaggtgggagatgaggtagcttgacctatgctgtgcaaacagagatggaaataagtagatttgagagacatttagaggatagatctgtagaacttgtcaatgatttgaatataagatagaaggaagagataattctcagagataattttagagtttctatcttggggaactgggtagatggtggttcaacaggacgtggtttaccagggaagaaattgcacatgttggaggattctattttttttttcttctgcagaggaatttggtctccctctctgatttaggctcaattccactggaaaaaaccttgagacaaagatttaaatgcaagtcatcagtctggggaagccaatgtggaaaatgagtagagaagagggcagtaagaaagggagtgaaagaaatctaatgtgtgttgatgaataggttgccactgtgggcaactggggatcaacctactgggaacctccaggagatgagatacaatgtgcttttgagttatttcaccttggggatgataaatatggaatatttacatgctaagtcatatccattatttgtttaaggactctcccatgggcattaattcatagcacttctggccttgcctgtgttctagccagtgatgccccagaaaccagagaaagcctcagagtgcaatgggaaggtgaatgctgaagggatattggcaaaaaatagacagtgtctgttgctgtctagtgccctccaatattttcaatttcaccatttctataagtttattcactctatcttgataattttgtccttttcaactcctgcctcatatctcaaattttcttttattgctacattttaactaaaccattgatccacaaattctttgatcttcaagtcaaaatggtaatttctataccactgcacactcataactttatatctttattataatgagagagtaatatattgtgaaaccatgcatgattttatgcccagttgtgatgaaaagctaagaagatgaactcatagccaagcatgcaaaatgttggtcacaacgaaataacactataaataatattgacttaaaaatggagccttcagtgcattagtcttaaactggaaagaaagagtaagttgagtgctttaggggcctgatcctaagttactccttatttttattagtgacttctatgatggagcagagaacacatttttcaacatttgctgatattgccaagttggcagcaactgccagcgctttggaaagctgcaatgtacaatccagggcaccactgggcacagactagatgcttcataaatacgtggtgactgatggactaaacttgagtacaatctttgcagatattcttccaaatcctatgccaaacttctccattctcctgggctccaatcttcatccccttcttctctgaggacacctgatgtcctatcaaagacgtgattttggattcctccattgcactttctccaccaacgagatttctatattaactcatgattccttcttgctaagttgcactttctcttttcctccatcaactatcttcttcgatccttctcctccatgccaaactctcttcattctcctggctggaaacctgttcaagtgttccctaaattaaaaacccatctgctctcccttatgcaattcctctgagcctctaagtgcttctctggagaaaaatagcctcgacccacacctccacttcatcattgccatttatttcttaatccctctggccttagaaggagccttatggaagaactctggtgcaaagccttttatatccagttcatggtacagctccaatcacttgcagctgagagctgaatgctcaatgaaaaagtactagtcagcaccttgcagcttctcctctccccaccccaatgtcttaaaaatctccattgcctcctttccactggttgagagtccttcatctttagctctttttcaaatacatttaaagtttcttccaaagttttcttctagccttggccccattccttccttccctaaattcttttacttgaggaactcttcttctctgataggctccactatgactgcagacaacttgtgagctctcctttttccttgtttatctctcacctttgtcccttaatgttaccccttgtgtaatttacacttgaaaatttgacagtgtgttatttctgttgcacagcttgaacattcctatctctatacctttgcttatgcaggttccactacccaccatggtgccttttttgccctttctccgatatccactttcccaattctgtgcatccaggaaaacccaacaccatagttacctctttcaaaaaatctgtgtggatatccttcagacaaaagacatttaccctcatactacattatctgaacttccatcaacatattcatttcttttcccctatgtaccagttatgcaattatatgacgttttcccatacctgttccagtcccttcaagtgatcccagattcatcatacagatatactccaggagacggtgaaaaatgtatagggcactgtggaactcatttctggaattatgccagaccacctacctcttctcccatgtttttattctcccacctgcagctttctaactcctgtttatttcgttgtggattcccaacaccactcactgctgaccctcccattttgctcttcagttggacctgcttctctgatacctttggatataatttatattactcataagaataatgggccaaagattatccaaaccccaccccaggactctttaactttcttggttttaaatcaacatagggtggccagatgataaagaggctgaaattctctggaattcaggtattggaatcatgctattgccaagtttatcaagcccattacagttaacactaatccttttaatatagtgagtgctcaaaatagaattttaattaatccattagtttctttgcataataaatgtttgaagaatgagattcagggtagggtgttttgaaggacataatgggaggaaatgtatgtgctttgggaagccatctgagacagcaagttctgtagaccgtctgcacaactagagaaactggactcttagagcatattggcaagccatttggtttggtgattagatgtgaattttctgagttcgaatcctgattccattgtccactagtgatccataacttaacctctctgtgcttcattccttcagttgcatgtataatactgtacgtgattgatatggagggtaaatgacatagtatctaggattaacaaagaaattaacaatgtctgatatgtactcaataagtgttaattattatcattaaagggagaagggtatagagaatctgagaaaaaaaggttgtcttctcttataaaaagttgttttcttcataattttacctagcaagggacttgaatagggtcttcctaatagttgcaacaaagtggtgagcattatttaaaacagatcagatacttaatctgttacttaaggaacccagactttttccacatgtgttccctgtctaggtccttgaaatccactcattcagtcagtggatggcaaaaataggatgagtatcaggaatgccatattttttatgagtgaggcatccgtagcctctactcacatctcattgatcagaactcatcacatgagtgcagctagctgaaagggaggctggaagatataacgtggctatgagtcaaaaaaaaaaaaatgaagaaatggacataggtgagtacttgctgttttggccactagtaccatttgataagcatttaccctcccgaatgaagggaccatttccagagcaggatcatcacaggaagtagcaagtagcaagctcatgcacatgtttatgagcattgccacattctccataatggaccctcctcctctcactactcgtacagggccacatggggttcaggggtacaaaggatcaaggagcataggaacatgccacttttattagtcaacagatgatcacaaaaggccctttatatgtatgcactaggctaagaaatactaggaaaaatagccaggtctacgtaaaacaaaggtttctgagagtttacctgagtaacaagtattcagtagaacaacatgaaataattaatatctgctttctttttctcactcaacattcttggacagagctccctcaaaatagtcaactatttttaactttcactgcctaacatatttagagctgtctttgtgtcccaaactgatgaaaaaacattcaacaataatgtaaaccacataataatattttaatattagtatatttaaagctaaattccaaatacaaatgtataactgacttggcttgctttttgaatcatgacataaaagaaaaatatttcaaatagcattatttttatacacagaataataattaacacaaataacacttaatatgatccagacactgttacaagtactgtacatgtatcatcacacttcgttttcttaattactctgtgatttcatctagctctggtttcctactcaaatctcatctcaaattgtaatccccacatgttgagggagggacctggtgggaggtgattggatcatgggggggtggtttcccccacgtttttctcatgatagtgaatgagttctcctgcgttctggttgtttgataagtacctggcatttcccctgcatcctctctctcttctgttaccttgtaagacatgccttgcttccctttcaccttcctccatgattgtaagtttccagaggcctctccagccgtgaggaactgaatcaattaaacctcttttatttataaattacccagcctcaagtagtatctttatagcagtgtgaaaaatagactctgtgaggtaggtgttatctccattttaaagatgtggaatcatctctcagagatgctgggcaatttgcccaaggtcacacaggcagtaactggcaggatagttattatatctcagatgatcttgttccagagtctgtgcacttgaccaattcaaatattagctctctcctcgacccccaccaagatttgaaattaattacacataacagagaactctaggttcaatggaatcactttacatattccttttagtttttttgaaatatcccataaactcataatatttgagcataaaatgtattaggcaaaatattctgataaaaataaaatacaaactctgtttggactaataaaaatgcttgtatcatccacatgggacattctatgaaaaaatatacttagatttttcctttattctgggtaaacaaattaacatctgttatactaaataggcaagcttaaccagccatgacgcttctcaacaaatatgttctggaaggttttaaaaatatatttattctggaggcttcagagaactagattgagcagctggcaatgcctaacaaggctcctatttcccctattcattctcatgaaaacattctctttcaaagaatcattcagacgagtataaaaggaaaatattaaaatatggaaaagtcaggagaaacagagggttgtagttctgcaaatagtaagatcaaatacataagattttattttcctagaaaaatggatgatttgaacaatttcattaattattttacccagtaccagggaaggtcattggaaatagatcttgagtccttaagcaagctcagtccttctctcagcccactgggctaagacattaaaataattatatcataagacaccaaaggacctgattgagctattctgtatttggacctggttagatatatacagcaccatggtaaataaacactagtacatatgctatatgagggcagtggttatgattcatctgggaagaaacacaagggaacatgaaggcacaaggaaacttttgggggcaatagacatgttaaccgtcttgattgtggtgattgtttcctggtgtgtgtgtgtgtgtgtgtgtgtgtgtgtgtgtgtgtgtgtgtgagacatatagatgtatgtcaaaacttaccaaattatatattttaaatagggacatttcttgtatgacaattatacttcaataaggggactgttaatttttttttcagagacgtcgatcttagtgatcgctaagcagcatccagcaggaataatacgtgactttagcaactcctggggctttccaaaaaggcctagagggatcccaccctgcccaggattcaggagagaaaacaaccttccttcctcatacagttaataaatgttaagtatggtggtaagcattgaagataaaaggaaaatttcaaaataaaagattatatgttaagaccaagaaacaaaatccagctatctgtagcatacataagacagatctgaaacataataataaaaaagagtcaaaagaacaagaaattgctaatccaaattgaaaaacagaaatcacagtcttaatgctggggaaatttgaatttacagatgaaagcatcgtttgataagagaaagattgaaactgcctttgcaaaattatgaaagtaagggaaatctgacatagttgactctattttgcttctaactttcaagctatcatgggtcactcttgggtgtagactgagttggctttgggagaatttaatttatagtttaaccttaaagcaaagatgataatagcactttccaaaactattaataaaccacctttgcaagtaaaacgaatgaaaggccacatggttaggattatgagaggggcccgaattctgctaagatgtgggtatagtttctataatcccttactgctcaggaatcatgtggccagaggtcacaagatctgtgacttccccaattactcctatagatagcatcactattataaaacataagatttttttttttttttttagatggaatctcactgtgtcgcccaggctggagtgcagtggcgtgatctctgctcgctgcaagctccgcctcccgggttcatgccattctcccacctcggtctcccgagtacctgggactacaggtgcctgccaccacacccagctaattttgtttttgtatttttagtagagacagggttttaccttgttagccaggatggtctcaatctcctgacctcgtgatgcacccaccttggcctcccaaagtgctgggattacaggtgtgagacaccacgcctggcggattggttgtttgagatatctttcagactgactccacctggactctggactcatgactcaactactcctgtggccccacccagaggctgactcagcacacaaggactgtatcccatatccctatgatttgatttccaaccaatcaacattcaccattccctagtcccctgccgaccaaactatccttgaaaacccctaacctctgttagatatgagttctaaatttcttttcaaagagacagtatgtcaatatgttcaattctttgccttctacttttaaacttaacttcctcgtaaagcaaccttttttgattacctgctccaccccaactctttccgattacctgctgtatcataaccatttttcccactcaccccatctctctctttaaaccactcaccccatctctctctttaaattagccagtcagaattagtgtagcctgtgcagtctaaccctagccaataggggaacgacacagcagtaggggccacatgcgtcagggataagtaccccttcccctcccttgtccaagtgtgcactcactgtggctcggtctgtaagggtgcacccttctatagaagtcacttgccttgctgagaattaaaaagaaaattttatgttcgagtgcaatttcttttgcagcactgaaactttatttataacacctctgagtcttcggagagattgatttgagtaataatgacacctcctaagtggcatggctggcctccctcaattaaactctttctgtatggcaatgccatggtctccatgaattaattttttctgtgcagcaggcaggaagaacctgtcgaatgattacaagatcatcttttagcatgacatgagaaacttagtgggactactccccagtgacgctggtgaaaattatacatatatatgtgtatatatatatactatttacagtctctggaaattgttctaagagtatacagcaaatgacacaactattcaagacaatctgccaaaattcactaaaaacagtgagaatctgtggtatttgaactaagactactctctccttcccctctcccagctcagcaagacaaaaacttcactccagtgtagtgtagccaagaacccaaggctcctcctacacccacttcctagcttggaggactagcttactgggaggggaaggatttcagcattcctcaccctgccctcagctacctgtagatgagcctaagttctctgaaagtttagccaacagggaggtttccctcctcctgctagcttccactgataagacggaggctcttgttggggcaaagcacctttgaaactactggggtctcttgtctccatttataaggccatggtttcatgctaggagaagcaagcagaggtcagctgagactactgtctcctcttctgcttaaagttcagcttctaaagcagggatgtcactcagagaatagctcatcactgtcccatactgcctgctatctgctaccttttgccagttcaagagccttggctcagtgattctgcctgaaggtcaaagtaggccttaaaacagataactcctaatttcttcacaaaggaagtggcttcgtttgcaacagagtatgaagatgtttaatcctgagggcattctcaagaaggataaagtttgtggtgaaaggtaattgggaaaatactagctactcactggagatatagattaaactgtggatgaggggattttccagagaaaatggggaaagagacatctaaggaaatctttcctgaggtcagaacaaatctaaaatgctgactttagtttgacagtgttagtatgcagagcagtttatgccctagaatactattgaaaacaacagagcaatcagacagcaattaaaggctcttaacagctgggcatgattagagaagtgatagtcaaagagctctgtcggagccagttaacccaaggtgaccataggcccatccaaggctgcagcccctgaaggttatcatcataagtttaatcatacgtgaggaaaatagataccaataaaatagctgatctagttactaaataaaaagacaataaaataacaataataagccctagaaaagcagaggtgatactcagagtggctactatatattatctaaaatgtccagtttccaacagatattacaacacatgcaaaacaaaaacaaaacagcaaagcatgatcaatacgctgaaaatatagcaggtaattgaaaatacctgtaagataagccagatgttggatttaacaaacaaaacttcaaagaagccattataaatatggtaaaaaaaaaaaagaaatcatgatttaaagagtaaaagaaggtacaatgacaatgttgtatcaaataaaaaacaacaataaagagaaattatttttcaaagtaggaattttagaagggaaaaataaaatgaaaatgaaaaattctcttgaggggctcgacagtatatttgaactggcagaagaaagaatgtgtaaacttgaagatagatcaaaattgattacacaagttgaagaacagaggggagaaaagaaataagctatcaagccatgaaaagacatgagggagacttaactcatattgctgagtgaaagaagacaatctgaaaaaggctacatattatgatttcaactatatgacattttgggaaaggcaaaactatagaagcagtaaaacgaccagtagttgtcaggagtttggtggaaggtgggggagagatgaacagattaagcccaagggatttttagggtggtaaaaacattctgtatgaaaatacagtaatagatatgtttcataattagtcaaatcccatagaactgtataacaagaagtgtaaacagtttaaacttagagttcatagaaccttaaggtaaactactgattacagttaataatattgcatgaatattagttcatcaacagtaacacacgtgccacaccagtgcaaaatgttaataataggggaaattgtgtgctggggtggaggaattgggtggagtgggtatatggaaatctttgtactatatccttaaatattctgtaaacctaaaattgtactaaaaataaagtctattaattattcttttaaaaagtgaacagatcctcagggaaatgtgttacactattaaggaaaccaacatatgtataatgagagaaccagaaggagagaatagatagaaagaaggataaaaataattgaagaaatgactaaaaacttccaatatttgttgaaaaagattgatctatacagccaggaatctcaagcaggatagaaagagatccacaaacaagcatctcatagtaaaaatgctaaccaaagacaagaagatggctgaaaaaagaaaatcttggaaacagcaagagaaaaataacttgtcatttaaacagactcccgatacaattaactgctgaattttcatcagaaacaatggaggtcggatggcaatgggaaaacattcaaagtgctcaaaatgaaaaccacacttcatcaagaattctataatcagcagggctatctttcaaaacctggaagttaactgaagaattttcattaaaaaaaagtaagtaaaaatgttgctgggaggactgccttataagaaatatgaaaggaagttctttaggctgaaagcaagtgacaccatatggtaattcaaattcacatgaagaaataaagagcaaaggtgatgataattttgtaattataaatactataaatgtgtatttctgtcccttattctattaattatttttaaattaattgtataaaaatatgtatataatgaattgtttgacctatgacataaaaaaataatgtttttgccaaacacagcacaaaggaggtgggtgaaagaagttactggtggtaacttgaatccagaggaagaaatagaggtttggaaatgataaatgaggagattaatatagcaatatctataaatatatacttgctctcttttcttcttttagattatttaaaaagcataaaatcataaagttctgtttataacaatttattggggggttgtaacatttgtagatgttataatagcacaaaaactgtctcactggaatttagtataaatctgaagctggttttgttaagtttggtgtttataattaaagtcctggaacaaccacaaaaggaataacccaagaaataaagtaaaaaaaaaaatcactaaagaaattaaaatgctacacaagaaaatattcactccatacaaaagaaagcaataaagggaaaatagaggaacaaaaagaatgagacatttagaaaacaaaaagtaaaatgacagatgtaaattcatctacatcaataatcacattacatgtaaatggattgaacaaccccataaaaagacagaaatagactggatttttaaaaagattcaattatatgctatttacaggagccacgttctagactcaaaaatactacactgaaaatcaaagttggaaaaagatggatcatacacacagcaaccataagaaagctggagtcactgtgttactatcaaacaaatttggctctgaaacaaaaataaatgttactggagataaaaaggaaaatttaataatgataaaaaggtcaatccatcaggaagatataacaattataagcttgtatacaataaaagactaccaaaatactagaggcaagaactgacagaaatgaaaggagaaatagggagtttgttatcatcatcaacaacaacaaaacacttggaaacttgaatattctgctgtattccgatgaatacagctagttcaaagatcaacaaggaagcagagacctgaacaacactacagagcaaccacacttaacaaacatttattgaccacacctaacaacagtagactatacatttgtcttgattcttctgcattctccaaaatagactttatgctgggccaaaaataaaccttgctaaatttaacaacgttcaaatagtacaaagtatcctctctgaccacaatggaatgatacatgttacaacatgggtgatgaatcttgaaaacatgctaagcaaaaatgctagttgcaaaagactatacaaaacgtccagaaagagtatatctacagagacagaaagtaaattagtagtagcttagggctcagatgggagtgaggcaggggagaataggagagtgatacctaaagatttcaggctttctttttgagatcataaaaatgttctaaacttgattgtgagtataattgcacatatctgtaaatacactgaaatcattggattatacactttaaatggttgaattgtattatatgtgaattatatcccaataaaactgtttaaaacatgttagataattcccaaatagaacattataataataaaatgtgcaatccacaatgaagaactaagacctatgaatatgaatgcatcaaataatatagcacttatattttagaagctgaaactataagaaatacagagaaattcacataaaaattttatggcctaatatttttatttatttatctcattccatgacagattaagtagacaaaaataaaaatttacaaaacttaaatgatataatttattgcaggggttcatatgcatatttatatatacacacacattgattcttgcctaaaaaccaagtattaattcttctagacaagcaccccaggaatactcacagaagttatcgaatattagaccttagaggaaaatataagtaatatttgaaatgtaaaaataacgaaaatatgctctgatcacactgcaaaaatccagaaataaataaatccagagagagagagacttttagctgactttcaaggaaaagagtaaaaagcaaacatagataaactttggaaatgacaaagaagaaataatcacaggtacagaagaaactttaaataattatcttaaggttgtacatcaaggccagttaaagaagtgaggggtataacagctatgtgtgtttttaaaaaaatcctagcactttgggaggatgaggcaggtggattgcctgagctcaggagttcaagaccagcctgggcaacatggtgaaacccttctctgctaaaatacaaaacattagccagacatagcggggtgcgcctgtagtaccagctactggggaggttgaggcaggagaattgctagaacccaggaggtggaggttgcagtgagccaagatcgcgccattgcactccagcctgggcaacagagtgagactccgtctcttaaaaaaaaaaaaaaaaagaaagaaagaaagaaaaaagaaaaaaaaaactctatatattaatcagacggttttttctttccccttctatattccctactattttgtaagagtgtcaaattcacaaaatcataaagagtcacatttgaatgtatccacgaagattgcttatgtctggcaatcctgaacacgaggagaataccatgtctgatggaactttgtgtttccttggctggattgatgagcagaaatgtctacatgttcactggagtgaacatgcattgggaactaaaaaatagaaaggttgactgtaccagacctgggcttaactgtctacagatatatttcttatctctcccgtcaccctttttttgttgttctgcctggaattagaggtgaggtgaggctgattcctgcagattctatacctcagggtgggtcagccagcctctgatagggtttcacctatggtggcactggtggtggttagaaaggtgcaggaagggtccttctgtcatccttcttcctcttgagcagatgatatcttagtagccctgtctccctgtgtggttccagctcttctatgccatgatggttccaacctgcactggaacccctgtctcttgggtttcactaacattgcttcttccctctctcacatcagcctaggatggtagcaccttcctgctgcagctaatctcagattgtttcatattcccatgtgtcttcccagtacttccatcacctctgtaatcagcacactctgcctcacccccaagcaccattactaaaaccctcaagtgggttttaccaacccttttgattatcagtacatcaagaaatatattctgcagttacacgtgtgcatgtgtgaagtgacatatttctaagtttattatttgctttaatgtttacagtagttgaaaaattagaataaggcactgttaataatggtatacccataaaatggaatgttgtataggcattaaaaagaataaggcaaaattttatgctttaaaataattttagttaacaggtaataatggtacatatttatgggatacaaagtgatatctcaataactgtatacgatgtgtaatgatcaaatcagggtaattggcatatccatcacctcaaacacttatcatttctttgtgctttgaacattcaaaatcctgtcttctagcttttgaaaatatacaacaaattatagttaaccatattcaccttacagtgctgcagaacagcagaactcattcctcctatctagctgtaattttgtacccattaactaatctctccacattcttccctaccccctacccttccaagcctctgttactcacattcaatgagctcaatttttttcagctctcacatatgaatgagaacatgtggtatttatctttctgtgtctgacttactttgcttaatgtaatatctttcagtcttattcacattaccacgagtgacaggatttcattctgtttttatgactgaatcgtattccattgtgtatatatatcacattgtttttatccattcatctattgatggacatgtaggttaattacatatctaagctactgtgaatagtgctgcagtaaacatgggagtgcaggaatccctttgacatactgatttcctttcctttggataaatacccagtagtgggattgctggatcatatagcagtactattttgagttttttgaaataccttcacagtgttttccataatggctgtaccaatttacagtcccatcaatagtgtataagagttctttttttctgcatccatgtcagcaaatgctattgtttgtctttttgaaaatagccattctaattggggtgagatcatatatttttgtggttgtgatttgcatcatttccctgttgattagtgatgttcaacactttttttttttttttttttttttttttgagacagaatcttgctgtcacccaggctggagtgcagtggtgcgatcacggctcacggcagccttgacctcccaggctcaagcaatcctcccactttagccttctgagtagctggaactgcagctgtacaccaccacacctggctaatttttgtaatttttgtagagatgaggttttgccatgttgcccaggcagactcctgggctgaaacaattcacctgccttggcctcccatggtattgggattgcaagcatgagccacctgttgtattgagttccttttatgctctggatattagtcctttgttgaatggatagcttgctaatattttctcctgttaaatagattgtttcttgtctcttcactccgttgttgcttttgctatactgaagttttttaatttgatatagtctaatttagctatttttgttatgttgcctgtgtttttgaaatcttagcaataaaatcttcaccaagacctaagacatttctcctgttttcttctagtctagtagttttatcgtttcagatcttatgcttaagtctttaacgtattttgagtgaatttttgtgtatggtgagagatggggatgtagtttcatttttctgcacatggatatccattttcccagcaccatttatttaagaggatatcctttccccagtgtaggttcatggcacctttgtaaaacattagttggctgtaaatatatggatttgtttctggtttctctatattgttccattggtctatgtgtctctttttatactaatactatgctgttttggttactacagctttttctatttttttgaagaatgtcattggtatttttactgggattgcattgattctgtagattgctttgggtagtattgtcattttaacaatattaattcctcaaatccatgaacatgggtgtctttccatttgtctgtgtcctcttcagtttatttcatcaatgttttgtagttttaattattgaggcctttcacttctttggttaaatttattcctaggcattggtattttattttttgtagctactgtaaatgggattgctttcactggattgccaatggaaaggaaatcattgcctgtagctgaataataaagtaactgaaaaagaaataaagacaatgatttccttttcagctactttatgattgatgtatagaaatgctactgatttttgtatgttgattttgtgtactgcaactttacttcattcattgctcctttttcagagaattttggtttttaggtttttctaggtagaagatcatatcatctgcaaaggaacaatctgactttctgttttccaatttggatgccctttatttttttctcttgcctgattgctctggctaggactcccagtcctacattaaataagagtggtaaaaatgggcatccttttcttgttccagttcttagaggaaaggctttcagcttttccccattcagtaagatgttagctgtgggtttgttgaatatagcctttattgtgttgaagtgtattccttctaaattttttagcgttcttatcataaggaggtattcaattttattagatgctttttctgtgtctgttgaagtgattgtatggttttgtccttcattctgttgatgtgatgtatcctattgatcaatttgcatatgtagaaccattctttcacccctagaatgaatcccatttgaatatggtgtatcatctttatgacgtgttgttgaatttggcttgctagtattttctcaaggatttttgcatgtattttcatctgcgttattggcctatagttttgttgctgtttgtggtgtgtccttgtctggttttggtatcagggtaaagaattttatgatttggagtgaaaagaatctccaagatatattgttaaaggacaaaaatgaggtgtagaccatgtatatatatctcaaaattatacatttgaaatggaagaataatggagtgacataatttttaaatttttttaaattaaaaaattattttatttttgagacagggttttgctctgtcacccaggctggagtgcagtgctgcgaccgtggctcaccgcagcttaatctcctaggctcactcaagtgatcctcctgcctcagcctctcaagtagctgggaccaccggtgcgcagcaccatgcctggctattattcttattttttgtagagatgagggtctcactatgttgcccaggctagtgtcaaatacctgagctcaagtgatcctcccacctcagcttcccaaggtgctaggattacaagaatgagccaccatgctcagcccatgtagtcaataaggatgataaggagactttttgatattgcctactttttctaccttctatgcatttgttaacattccaaaattttgtaatctttaaataaaaatgattattattaaacacgaaaatgtatataaggtgcctagcatagttaaaacaacaacaacaacaagagcctgagctgccaaagtgggctcactggatttgaaagtttcctctactctttattagctacatgaccctgattaatatccttaacctttctaagagacagcttactcacttataaaatggggataataatagtacctgcctcatagcgtgggggtatagtgagatgacccatgaataatacttaacatagagcacagcctataatgagtctttttaatcaccttggactatcttgttttcactctaatcttaaaattaaaggagatttctttatccaaacctaggatgagtgtgtgaggcagcatggtggagccatctaggggaaaagcaaagaaaaagatttctccctgtctatccctactctgtacctaactcatagatcaaggaatttggtccctaaagggaaggagcccccacccccacccatgtagctattacttgggagctgttttctagcagagccctttcatgtcaccaccaccctcatgaaggtgttaagatgtttataacagtgatctgtggcactaaatcaaagtgcaccaaagtaataaacatgaggatgaaagcaggtggggcttgagggatggaagatggtgattatatttgaattctgaattgagcagttagaaaaaaatagactctagcagcaccttttaacacacatatttacagtggccagacatgcatgtcttccagcaaggaagaggaagaagaaggagaaggagagacaaattaagattttttatcaaagaaactccatattttttattgtagtgggaacaacagattgctccccaggtgaaagatctgcattgataagcattaaaaagcaccagaatgttatttcttcagcctctgtaggaatctttcccaccacgctgatgggaactaaggaagtgtgcgccctctttctggacagtagaagaacttcatggacaactccaaattcaaggatgactagtcaggataaaaagaggctataaaaaagatggagtaaataaaagattagatgtatcatccctaagatatggagcaagcccatgtacttaaaaaatactctaaagtctagaaaataaacataaagatgaaaagcataatcttcacacctttaatgacattcaggaaatcatacattctaaaaaataaaactcaaatataaagtaagacaagttcaagtaaaaaggaaatggattaaaggaagacaggaaatgtaaaagaccagaatatggtaagagcttagagaaatctataaaggataattaaaatcagtcttagtcaataaatggagataagagataataaaaggtgttaatggatagatggatggatgggtgttaaggatggatgaaatacatgggggttcattatgcaattatatccacttttaaaatattcaaaatactccatgcgtaaaataatccttcttagaaataataagacattgcagaaaagcaagtctctaatttggaaaactccaagaatgcagaggtaaagttctaggacttaaaaagatgagtagagaaatgaaagatatagagaagaaaaagaaagcaaataacccaataatttatttatctataatgtaaaaaatcagattaaataatgaaaaaaacactcctgtaatcccagcagtttgggaggccaaggcaggcggatcacctgaggtcaggagttcgagaccaccctgactgacatggtgaaatcccatctctactaaaaatacgaaaattagccgggtgtgatggtgggcgcctgtaatcccagctgctggggaggctgaggcaggagaatctcttgaacctgggagacagatgttgcagtgagccgacatcatgccattgcactccaggctgggtgacaagagggaaactccatctcaaaaaaataaaataataacaataataatgaaaaaataataaagttattttgctttttaaagccagaggagaaattaaatctaagaggagaaattatttctaaggagcttataataaatgggatcaaattaaagaaaaatatgtaagaaatatatatttttggtggcatttttatttcaaggagagagaaacaaatttttacaagaatcaaagagggaaaaaaatagcaagtaaaaaagaaaattcctcacatgagttctctacagcttttaaaaattggaaaccaatggtgcattatctacagtggcttatggagaaaagactgtaatggaagactcaggtagccagttgtatcaatcaggtttcctagtggcagacaagagaatcttctctaggtagttttagcagacaagtctttgttaaaagatccttggtcatctacagaatttttgggaggaccattatacactcaagaaccaagcagtctgagaaaacaactaaccacacccacccactctttggcagctatacagtagcaagagaaacccagtgtctctgatccatctgttccagatctgagtgctcctgtgacacacatacatagttcagcggtattgtgggttcagtcctaggtcactgcaataaagtgtatatcccagcaaaatgagtcatacagatttttttagttttacatttatcactgtaaaaccaataacaattttacaactagttttgtacatagctgttatatgtagggccatctgtctttaagtagggatacattactgtaaaaaagaaaaagaatcctagatagtttttccttcaagtcaagtatttgtagtttgaatacatctcctgttttttttcttaaaaaaaaaaaaaagttggagtcaatcctctgaaatcctgccatggctttaacaactaaattatgtaatattcttaattttttattgtcatttaataatgttcactgcatcttctgcagtagattccatctcaagaaaccagtttctttggttattcataagaagcaactcctcaaccattaaagttttatcaagagattgcagcaattcagtcacaccttcaggcttcacttttaattctagttctcttgctatttccactgtatctgcagtggcttcttccaataaagtcttaaaccccccaaagtcatccatgagggttggaatcaacttcttccaatctcctgatcatgttgatatttttgcctcctcctatgaattatgaatgtttttaatggcatctagcattgtgaatcttttccagaaggttttcaatttactttacctagatccattagaggaatcactatctatagcagataaagccttacaaaacatatttcttaacaagactggaagatcaaaattactctttgaatcatgagcttccaaatagatattgtgttagcagctatgaaaacaagattaatctccttgtacatctccatcagaggtcttgggtgaccagttgtattgtcaatgagcagtaatgctttaaaaaggatctttttttctgagcaggaggtctcaatagttggcttagaagattcagtaaaccatggtaaacagatgtgtcattatccaggctttgtgatccatttctagagcacaggcagagtagatttagcataattcttaagagtcctaggatttttggaatgataaatgagcattggcttcaacttaaactcacgagctgcattagtccctaacaagagcctcagcctgttctttgaatctttgaagccaggaattgacttctccttatgaaagtcctagatggcattgttttccaatagacagctgctttgtctacaatgaaaatcttttgtttagtgagccaccttcatcaatcagcttacctagatctggataacttgctgcaacttctctgtcagcacttgctgctttacattgcatttttatgttatggagatagctcctttcctcaaacctcatgaaacaacctctgctagcttcaatctttcttctgcagcttccttatctttttcagccttaatggaattgaagagagttaggactttgctctggattaggctttggcttaaggaaacattgaggctggtttcattttccatccagaccactcaaactttctccataccagcaagaagattgttttattttcttatcatttgttcactggaatagcatttttaatttccttcaaaaactttttctttgcattcacaacttcactgtttggcacaaggagaataacttttggcccgtctcagcttttaacgtgccttccttagtaagcttaataatttttagcttttgatttaaagtaagagatgtgtgactcttcctttaacttgaagacttaaaggccattttagggttattaatctacctaatttccatattgttgtgtctcaaggattagagaggcctgaggagagggagagagatgggggaaccgttggttggtagagcagtcagaacacacacaacgtttattgattaatttccccatcttatatgggcacagtttgtgtcacaccccaaaaaattacaatagcaacatcacagatcaccataacagatataataataatgaaaaagtatgaaacagtgagaattaccaaaatgtgatacagaaacacaaagcgagcacatggcattgaaaacactggcatggacagagatggctgggagcagtggctcacgcctataatcccagcactttgggaggccgaggtgggtggatcacttgaggtcaggagtttgataccagcctggccaacatggtgaaatgtctctactaaaaatacaaaaattagccaggcctggtggcacatgcctataatcctagctactggggtggctgaggcaggagaattgcttgaacctgggaggcggaagttgcagtgagccaagattgcaccactgcactccagcctggtcagagaagcaagactccatctcaaaaacataacaaaaaaaaaagaaaactctggcgtggacagacttgctcaatacagggttgccacaaactttcaatttgtaaaaaacacagtatttgtggagtgcaataaagtgaaccgtaataacacaggacatgcccatgctttgcccctccctgctttattgaggtacagttgacaaataaaaaattacatgtatttaaggtatgcgacatggtgttttgatagaagtacatattacctcttgtaatgattccacaatcaaactaatgtatgtatccatcattttatgtagttaccaagtatgtgtgtgtggtgagaatacttgtaagttactctcttagcaaattatgtttatcatacattattattaactataattaccatttgccatacattactgctaactgtatttaccatgctgtactcaccacatttaacatgtttagattccacatatagatgattatattagtccgttctcatgctgctaataaagtcataccacagactgggtaatttataaaggaaagaggtttaatagactcacagttccacatgactgtagaggcctcgcaatcatggcagaaggtgaaggaggagcaaaggcatgtcttacatggaggcaagcaagagagcatgtgcaggggaactgccctttataaaaccatcagatttcttgagacttattcactatcacaagaacagcacaggaaaaacccgccccatgattcaattaccttccaaccaggtccctcccatgacatgtgaggattaggggagctacaattcaagaagagatttgtatggggacatagccaaaccatatcagtgatattatctaatatttgtctgctgtatttgggatatacttgccagaaattcgtctgtctcccatgtgtccatggacttatggtttcattttcacttcttcatattgaagggtatttctgattgacaggaagatcacatgcaaaaccctggctgcaaggaagtctgggaaatgtagtattcagctttctagccacatagcagtgctatttaaagtgtgtttcatggaccagcggcaggtctcattttgctagttgtcaaagaaatggtacgtacagaaattaagagtagttctttagaaatcctttatctatttaacagagtagtagagtctgttgaatatgataatttttaagtgaggtttattttttgtgttttaaattttgttgttttttttcttgttgtatattacaaaagtattgatctgtggcagattgaaaagaaactggtatgtaccacggataatttgagaaaaattgttatataaaatacctgtcagttagctagaaggaggttgaaatgaatgccaaaagagccaatgtatattagataagagaaagacattctcttctatgcaaagatgtagagcctatatatcatgataccctttctggaaaaatgaaaacactagagaatagaataaaaataaaaacatctccagactgggaaagtaatggcgtaagagatctaatgatgaatatttaaaccagttaaacatagaattgtaagtattgttgaaaaaatataatacacatttaaaaatctcctttcctttgtaaatgggtatagtggctgacctccaagatggctccccaaaaaccccacctcttagtctttatggcctcctgtggtttccttccatatcaaacaaggctgatttctataaccaaaaggatgtcgagaaaatcatcgcatgtgaattccaaagctaggttataaagctcattgcagcttccatctggctcccttggaatccgtggctctgaggggagccagctaccatgttgtgaggatgctcatgcagcaccacgaagaggaccaggtggtgaggaacaaagacttctggccaacagctagcaccatgttgccagtcaagtgagtgcacatcgtggaagcaggtcctctagcctcgtccagccctcagatgacggtagccctgatggcacctggactgcaacctcatgaatgaccccacaccagaactgaccagctaagcctcccaaatatctggctcacagaaactatgaaatagtgaatgttttttgttttaagttttgagggttattttttgaacagcaatgtattagtccgttctcacattgctataaagaactacctgagactgggtagtttatacagaaaagaagttcaattgattcacagttctacaggctatacaagagccattgctggggaggtctcagaaacttacaatcatggtggaaggtgaaggggaagcaattgccttcttcataaggcagcgggagagagagttaagagggatgtgctacaccctttaaacaaccagacctcatgagaacccattcactatcatgagaacagcaagccgggggaggtctgcccccatagttcaatcacctcccaccaggcccctcctctaacatgtggggattacagtttgacatgagatttgaaggggaaaacaaagccaaaccatatcaagcaatatattaatatattttctgaggtaatttgttacacagtaattgataactaatacaatgagaatagttttattataaaataatattattattataaataattaataaaaatatattttgttggataatatagttaattgaatatacccccaacatcatggtaattttgaattttagctgtatgtgttttaatttaataaaactatgctgataactctcagtctccttggttcctccattgcgaaaaaggatatagttctaataaagacagcaggtaaaggagattttcctttaataaacattttcaataggaaaattctctatcacaggatattaaaagaattgtcctgttctgattttctcttttatcctaaatatttgaacacgcctagaaggtgcaaattttttttttttttttttttttttttacttttaactgtcagttttgaaaggcatacaagatagaggatcgtttattgtcactagagggttaaaatgaccattttatatccaagagacaaaagaatttatcccacgttatgctgccctatgtagaagactgtgagagtaagaattatccagtaactgcagccaatgagagacttctgtcttgactggctctggaggatatgcctttgtgctttgcatagcagagttggagaaaatgggcttaccccttgtaatgccacacagccaaggtgctggaacattcataaatgacttaggggaaacggagctaaggagatgccggacttaccatggttaagacttgtgtgaattaagtggttttcatctaaacgtacttagactttttgaggttttattgacttcaccccacatagtactgcttccactacccttaatcttatttcctaccatataaaagctgatgttaatacttcagcaaggagtgccagagagtaaaatctcacatgcccttgcattatgccaaatacttttccatttagaaaatacctcttatgtgtaagaataaaatcagaaggcatatggagattagacactgctagtaaattaattttcctgttgttgttaaaagaagcatatcattttccatttctacttttaaaagttttgtatattttaatattcaatttatttgctttcattaattttaagcttttgctggttataaacactactataaagaagagagtagcatagaaaccacagatagtatgtaaagggttgtaaacaaaagacagagaccaatagcagcctaatgtttaagtgacagggactaaagttaatgttaatgttaatgttaagtgacagggattaaaacagtttcattttaatcatttggaaagtatatgagcattattattatgaaataacatgtcaggaaaacaattttaagccaaatgctattttcctcctacattaaagaaaaacaacatttccagaatttcatgtttaaaaaaaatcctacactgtcatacctgctctgtggtcacttttctagaatccattcagcttttaatttgaaataagaaatgatttggggttggtgggtgtattaggccattcttggattgctataaatacctaaaactgggtaatttttaaagaaagaggtttaattggctcatggttctgtaggtcttacaggaagcatggtactgggatctgctcagcttgtaggagggcctcaggaagcttacaatcatggcagaaggggaagagggagcaggcatgtcacatggcaaaaacaggagcaagtgagagagacagagttagggaaaggtgccacaggtttgttttctttgttttttgttgttgctgttattgttttgagactgtgtcttgctctgtcacccaggctggagtgcgctggcgcaatctcggcttactgcaaactccgcctgctgggttcaagcgattctcctgcctcagcctctcgagtagctgggactacaggcatgtgccactatgcccagctaatttttgcatttttagtagagatggggtttcaccatgttggccaggatggtctcaatctcttgactgcataatccacccacctcagcctcccaaagtgctgggattacaggtgtgagccactgcacccagccagtgccacatagttttaaaggaccagctctcctgtgaaatcagagcaagagctcaggtattaccaaagggatggcccaagccattcacgaaggatccacccacatgatctaaacacctcctaccaggccccacctccaacactggggattaaaattcctatagcagtggggctgaaaactagaggaagaaaaatagtggaagatactatgaggcttgggctgtgctttgcatggtttccagctcctagttcctcatataaaacaacaaggagagtgctagacagaacttgatcctggatagtagaggtgtgccatcctttaatttggtaactgcataaaagacttccagtgttttcttgtcctcctctttaataatttactttactactttttcagttacaattcctactgtgtgttcttctacccgagtaatacatttaaaaaaacattttcaggtaaattattttaacagaagaagaagaaaaggactttctataaagcagtgaacttcacacaatgaaatatctccccctagttaaaatggctattacaaaaaaaaaaaaaaaaaatagatgctggagaggatgccgagagaagggaactttgtaggaatgtaaattagtacaaccactatggaagacagtacggagattcctcaaaaaactacgaatagaactaccatttgatctggcaatcctaccactaggtatttatccaaatgaaaagtaaaacaggacatcaaaggaatacttgcattactatgcttattgcagcactattcacaatagccaagatatggcatcaacctatgtgtccatcagaggatgaatgaataaagaaaatgtggtatatatacacaatagaatactattctaccataaaaactaataaaatcatgtcatgtgcagcaacaagtgtcactgtgttaaatgaaatgtgcatattctcatttacatgtgggagctaaaaaagttgatctcatggagcctgagagtagaagaatagatatcagaggctagaaagggtttgtgtgtgtgagggagggagggaagatgaagagaggttgattaataggatacaaacattcagatagaagtaatgagttctaatgttcaatagcagaggagggtgactataattaacaacaatatattgtatacttcaaaatagctagaagagaggacttgaaatgttcacaacacatagaaatgataaatacttgaagtgatgggcaccccaaatatgctgacttgatttctacacagtctatgcatgtaacaaacatcacatgcacacttaaatatatgcaaatacaatgcatcagtaaaaaaagcagggggcttccttggaatctgaccacagccttgatgaaaagtgttcttaaacacatcaataacaaaagaaaggaaccaacgttaagtaaatgcccacatcatctcaggtacctcctctgtgttttctcatttaatccttattaaatggagaattcttgaggaatcactgagttagaggtcagaaaatagaaatttaaatatcaacaaataagtagtggatgaatggccttgtgtatgactcaaaagttcatttcctttaaagtgttttcttgtactcatgagtatttttactatttcttatatgtctgaaaaattcttactcccttaaaccctgctgaaaagtcacctgtcctgtgactttttattttattttattttctattttttatttttttggagatgagcctcactctgtcacccagtttggagtttggagtgcagtggtgtgatccaggctgcaacctctgcctcccaggttcaagcaattctcctgctcagcctctcaagtagctgggattacaggcatatgccaccacgcccagctaatttttgtatttttagtagagacatgttggccaggctggtctcgaactcctggcctcaggtgatccacccacatctgcctccgcaagtgctgggattacaggcgtgagccacagcactcggctgtcctgtgacattctgagtcctctaagaatattgccatcttggcacctagaaaagttattgccataacccgatcacatttcagtctcttaccaagattgtgagctcctgaaagggaggggtggtatcttctttgtctttttatgcctaagacctaagaagtttggtccataataagaacacaataaatgttgaatgaataatcaatcagtctgattgtctgtctatctagctagctagttatatgtatgtgtatattctttccaagggagattcttttgtgttagtaggctctgatttgaaaattaaaattgactgttaagatacatgcacatcttgttaattatatgatggtgatgctccttacctagctgatatcagctgctctcgagaaacatctgtttaacccaggggctttcagaatgcagcaatgactgtgctccacagaaggtaggaccatgtgggttgccttatggaagacctggggtggcagaccatagacttcatggtgaaaactaccaaatatgactttagctaacttaagtaaaaaaattcatgtatttgaaatatcttggttcgctttaagaatgaacaaaagttctagagaaacaagtttcagaaatgaacagtagtcaagggtagctaggtggctggctaaatcatggactcctattagggcaccattgcagactaccggacacttctcagggaactttggcccccactcccacagcagccatggtctgggtctttcaatatcctggaagggatcatcccattgtcccaaactaggccacgtgatcatgccctgcgtgccagggagtgaggaaagagaatgtctgtgaggaaagagaatgtctgctccttttatcttccatgactgaaactaggctttgcattatacttatttggggataatccctaaatggaaagagtatttgcttactaataaccactgacaaataatagttatactagattgattgcattgatgacttaaggccctccactaccctggtgctgaattctggggggaatgtctactgtctcttaccccttgtttctattcctacagtactatttggccatccattatttctgttctaggaattggcaatgatctgctattggcttcttgctcctaccctcaaatcataattcatatgttgtctcattttattctgtagctttcttggttctcctttttcacaagtgtattctcatccccattccgatccccactcctgatatgactttaaatgttgacttttgattaatagtcaagagaattaacacattgatttggaattttaagcaagattggagattgcttacatctttgaaattatatcacaaacttttctaaccattcttcaatttgagtgtatatcaaaatcagtggtggcgggggatgtggtatgctaaaacacacattgctaagcgctgcaaacaaaaatagagctaccttttctgaggagttacacatttcaaagcaggtaattattttatttatgaaaatggattaatttcaaaaagatttttataacttctaattacattaatctgtttcaaataaaacaaactaataaagtatatagaacaacagtgtgtacattatgataggtatcaaatgtgtgtgaattcttccccttgtcccctacaaaaccaccctctcacaggaaagattcaataaacttttaataatctaaattaagtagcccattctaaggaagcatttagtttcttgttgtctgacaaaactgtgacaaatagagaatgtggaactttaagatctgttatggaaaggaaaaaattaacagcaggactgagacatccagaagtaatgaattcagtccaatctttatgtgaatatggtaatgacctaaagacaaggccccctggtaaacatagtaatggtgttgataggtggaattataccagggggtcctgacctataaattttttaatgggatatgtctggtttctcttgattatttatcataacacaaaattggaatttatgtatttgtaggtcatgaatggctgaaaaatgaagggtcataccataaactgtaactgagagaatataaaatggactgttctaatgtaggactggatctctttgtgtgaagtttctctatacacattgcttaggaagaaacttgcctgaaacaaatattcaattaaatgaaaaagaaaaatagccttttgggatctgtgcctcactttgtcagattcctccaagaaattcacatttcacttgtgcctgttgattttctgtttccttggaattattagtgctgtttaatattgggtaggatctataactctgtgagtctcctttgacaattcaactttttgtgtttaaaaaactcggatgtgggcgctggggtatggacagggaattgtgcaaacactgatgtcaactgaaacattccagaaaagatgccccctgagaaatcatgtggatatatccagaggaatttttacctatatccttcaatccctacggattaataagggctaggggcctttgggtatagcttttaaatgggtatttaagccaaaagaacaagaattgcaatgaaaatgcctagaatgagtgaagaagagatcccagaaaacaccagttatttaattgccagggaaaagaagacagttcagctagaaaatacaaaataatgattattagaggagaagcagtagcatgtgatatcttggaagccattcaggagctttaagtgtgaagggttagctacaaagtcaaatgtcacagcaggtcaagaaagatataatcatgatgataatattaataaaaaatagggagcacctactccataaattattgctaattattgcacctactaattaagcacctattccataaattattgcataccttccaagctagtcattattatcactgttttacaaaagaagaaaccgaggctaggaaggttaactaactagcccaagattacaccatctactactacttgtttgagtgaggatgctgacctaacattctgatttgaagctctgcttctgtcttctggtcaggaatagctgaaatgctagatctactgggtctggagagtgggaggtattttcacccacaggatggcagttacagtgaaacaatggaggcaggaggcagtgggtcagtgggtggacagatggaaaggaaagagtagctatgaggattccacattctggagacgctgagctgtgaaaagaaagagaagggtggtgactgggggaggatgcaacattaagggagggttttttttaggttagagaagaatggaataagtttatagatgaagaggaaggaaccaacacagaggattggtggaagttacagaagagaaaaggaatcaatgaaggaagtgactgaaataggtaagagagataggggtaagataacagggagaagttttagtcttggatgggagaagcaatgcttcctgtctcgagaacggagggaggaaggttttatggaggcaagtgagggcaagggactcttgcttgatggcctcagttttgttttttactgagcagcaaactctgaggagtagcaatggtttcaagaagtttggagaagaagcagttctaaagcaaataaaagaggtactggcctaagtggcactacaaaatctgactttttaatggtataaaagacacacttgtgcagttttcttctgcagcctaacttggtagaaacccgagtaaggacaaaacattttctccacttgcctttgatcctgcctcaatccctaagatgaatttcagccatttggaagcattgggagaaattttctgcctgtctctctgtttctcacttactctgacagatgacatctgcttagcaaaaagctcatcgttatgtgcagtccagaccctcttgatgatgtcttttgggaccagtgcctttgagagccttggatgttttctctgctgctgcccctgtatggtaactcagcagggcctcccgatccctattataggaaaggcagcaatttctggctgctttgcccatgacacgtggatgggttcctctcaggctgggagtcagtccccgattttggtcacagagtcattccacactgtcagatctggacatataagaaatcaccctcatctgatctagtatctaattattctaattttaaaattaaggcaaagttacatacagtgaaatgcacagatcttagcaacagattttggaaaagacatacacccaagtatcctgcaattctatccagatatagaacatttccatcccttcataaagttccttcttgccttccctcacctccagaaacaatcagtgttcagattcactcatcatggattagtttagcctggtctagaacttgatagaaatgtgtctatcagtacagaccctgttgtgtaaggctgctttcactgtacttgatttttacattcatctattttgtcatgcaaatcaatattttgttcatttttattgctaagtagcatactactatatgattatatatttatgcattctattgatggacatttgggttgtttcatggtggggtttcatgaataaggctgctatgaataaatgtgtacaagtacttttctgggcatatgtttttattttccttggaattactgggtagtttataacaaactgtcaaatctttttccaaaacgcacctttttacactccaaccagcaattataagagttctagtgcttttatatccttgccaaagttgttgtcagttattttaattttatatgctagtgggtatgtatctagctcttggtgaccaaagtttatctgccagtaggctccttgagaagagcttttcagaacaatatctattaattattgcacattcaaaacatgttttactcttttttcttgagaggcagtttgagttgttggattagctatagcactaaaattaatggatacggaaccattaatggaaataatgtcaaagaaggatgatctggggtggcaaatggccacagacctttcagggagcaaccaagaggagcagtcctgctgtttgcaaggtagggctgccattctttatggatagcatcctgggataatatgataggtggattattaaagtggctccaaatctcaccatcccctttgtaatgtaaacttgaagtcttttccaaaaagaggtggagatttttttgacttagccccataatgcaacagaagtgatcaagtgccgggttctgagactaaaatttagaaggcctggtacattttagtttgctctctcagttctgcctctgctgtgtgaacaagctcaagctagttgtcatcccatctctaagaaatagccagaccaaatcccaggcagaccaatgagccatccttgagaaatctagccctcttcttacccacaagctgaccacagacatatgattggcccaagatcaacctacccataaatttatcagaaataattacatggctgttgctgtaagccaggcattagcaaacctcagcccatgggccaaatctggcctgctgcctctttttgtaaaggaagttttatagaaacacagctatcttcacctgaacctgctgctataacaaaataccatagactgggtggcttaaacaacagacatttacatttcacagttttgaaggctggaaagtccaaggcaccagcagatctcatgtctggtgagagctgttttgttttcttcagagatggtgccttattgctgcatcctgacatggtagaagaggtgaatgctgtatcttcacatggtggaagggatggaagagatggaaaggatgaacttggtccctcaagcccttttataaggcattaatactattgtacatatatttgggatacatgtgatattttgatactgatatacaatatgtaatgatcaaatcagcttaatgggatatccatcacctcaaacatttctctttgtgtttggaacactgaaattcttctcttctagctattttgaaatatacaatagattattattaactacaatttcccaactgtatgatcaaatactagaactcatttcttttatttaactgtatttttgtacccgttacccacctcttaacactattgcactggggactaagtttcaacatgaatgttgaacttcataccataacattcatacaaacattcataccatagcaaaagataaactcatttgtttgcatattgactatggcttctctcatgctataatggcagcgttaactgtaactatagttgagacaagtagttgcaattgagaccgacctgtgaagcctgaaatatttactttctagcactcacagaaaagttttttgaccccttgttaagtcactgagcttttgggtggtttgttacccagcaatagctaactgatacacatggtaattgtcagataaatacagagaggactttgaatagtttccactaaaatagaattcatttgtttgttcctttattatatagacattgatggtctaaagttttgccatacacaacacagatatagctcttacctgactgagcttactgttcagtagggaaacaaatttaaaaagcaatcagggtataattaaataggtggatgaagtcacagggagactaggtgacttagccattcatggacatggtagcagcagcagctggtatggatgaggggatgttgtaggcattgaggagcatagtttttgtgaaggtagaatggacaagtctaaggcaagtctaagccattatcttggttcgggaaagtgtgtagaaatctctctcagggagtacattaaggagatgaaagtgtctgtatccttatgtggtggtagttacacaatctatacagtattaaaactcatagaagtatacaccaggaagagagccaattttactgtatgttaatttaaaaaatctatgccaagtataggcaataaaatacttcaaaatttgatgagaaagtgaagctcattattattttagaggtaaagtagttataaccttactttccctgattaacttattaatttctagggggatctacagcaaattcagaatttagtgcaaagctatcagagctccaaaaaaatcattgatatcgagtccactgagagaaagcaaaaagtttcatgaaaccttgaagtgttctatgtacctatatgtggaccacacatgagctgtatgtggttataaaaataccccagctatcccagcttctcagctccatgacagacattgttctcacttctaattctggagcaccaccactgtctttggccacacctacatacacacattttcagaaggtaatttattctgtccaagccgacaacttgaggttccacaatctctgctgctctcacactcccttgaacaaagacacaattattcacatttgataaagtcttcacttatgcctcctgatccacttctgggcagtattttttaacaagttttatgttttcagcatacaaaaagacatttatttccttaggatcttttcctataagcaagctatgctactcccaggtaccagtgagtgcttcaactggcagtgttttggaatttaaaccagaggtgtctaaggggttgtgaggttgctaaaaacaatccactgggtgccagaagaaaatataggaaacaaaaatatttcatatgcccacttgcactggttccttctcttggtttagatgtcatatacccaaaggaaggtcaggtgtcacacatgtacccaaagtaccccaaggaaaaagagtgaaatgctacattgctgaggaattggcaatagcgcccctgctggacttccatgtgtcaagacagatttgagcttacaggtgctagtttaagtgatttatagatgatcttgttgtaacaaaataaaaccatgtaaaatggacaagtggcttatagagtttcccttcagagaaaattggattgaaggcaatgctagtaaagcaaacagaagccatcaacaaggacctggcatttctcctattcttaatgaaggactgttctccaaaagacaggctcctcccagggagtgtgtgttcatgaacagggctgggggctgatgctgtcagataaaaggctttctttgtttacaacatgaggaccatgtggaaaagtgaatgccaaagttgccagaagggaatgctgcagttctcagaaaaagtaagggatattaggcaaacaaacaatagctgttcctaatgaaattctcttagattggcacagtttaaatgttcaaatcactttggtatcagatcggtttggatcttttgttatcctggaatcacttgaaagcttgtgtgcatttactgttttgctatttgtgctaatttttatgttttatttctcctcatattaacttcttgaaagcagaagtgtattgtatagcagtgtttctcaaactgagatcacacaaatcacaaagggatcctgataaaatgcagattcctattcaacagatcggggggtggcacctgagaatctgcatttctgacaacctatcaggtgatgccaatgctgctggtccatgggccacactttgagtaacactggtctaactctaggtagatcaatttatcagggtaggagtataacacagctgtttattatggattcttaattatgggaattattctgtgactgccttctataaagaaattctctgttggatggagcttcttcacccttttttcttccttaaagacgtcaggaaaaatcagagagaagaatatagcaaaacaaccctttcctccctaccaatcacaaagtggctgctagcttatttgaaatgtaaatataatgactctcatcaatggcactatgttactgaattatcctcagcaaactgaatcacaagcataagaaggctttttcagaaaagtgctgttgaaggcatttcaggacaccttacctgcttttcttgacacagctaaaatcttccccaaccccatagtccctgctcatacctgtaacactcatttgccctactgattcagagataaaattctctactgaatttcactgtcatttacatattttctttgctcgacttgtctttcctagaaaatatcaaactcttggaaggtcagggatagtaataacaaaaacaattacatcgattaacactaatccttaacattaatcatttacgatgtgtcaggcactgtacagactttgtatacattatttcatgcagtattctcaataactctcttattcctactttacagataagaaaactaggctcgaaaagaataactaacttacctgaggtatgggagagactacaatttgctacccaatacctattctccatttcttctcttgcaatagagactgaattccatgtggagtaccaatgcagttagctaaaagcctctcttggccaggcatgatggctcatgcctgtaatctcaaaactttgggaggctgaggtgggaggatcacttaagcccaagagtttgaaactagcctgggtgacatagtgagaccccaactctacaaacatttttgaaaaataaaaataacagcctcttttgaaggtaggtatggccaggatactagcacgtagccaaggagatgtaaacagaaaggtggcatagaacttgacgatggaaaatgagagctcagacttcaagtaaataagcaacttataagataagaacttgtcaaccttctgactctcttcttttgtcagaccttccatgatcatttgatgtttttaaactttggcagccatctttaaccaaaaggttaccttggggatgaaggccatacactaacatggtggggccaaaaaataggaagagcctgggttcctggtgaccttgaagctgcatttccaattcaggactagtagctccagactgctattacatgagaaagaaagaaatatgtaagtgctatttgagccattttagattacccctcactctgggcctggacttacctaactgaagtgtgtctcacagttaacaagagatgtggcttagattcagccataggccatttcatactgttttcctaccctcagtgcccagctgaaaacagcacgttgtatgctctgcttagtttggccacaataattaactctttactaagaagaaaaaaaaaagtcccttcccaggatttgctttcatggtctgcttcagtagcacaagtcaggaatgcaccagcatccctctaaacaattagaaaatgggataaagatatttctagaatggtgtagatacttttcaagatgtttcttttattaattgctattcttgcactccacatttttctcatttgcaatccatacatctgatattgccattatcatttgtgcattcatttggcacctatttattaagcacttattacatgctaggaaacaacctcgggatggaagagtgaacaaagcagacaatatccctggtttatggcatttatattcttatggtgggggagaagaggacaaacaataaacaataaaataacaggtcaggtagagatatgttttatggagaaattaaaatgaacaagggggatcatgttggcaggtgtgttaatcaggattcccttgagggacagaactaacacctgtaatcctagcactatgggaggctgaggcaggtggattgcctgagctctggagttcgagaccagcctgggcaacacggtgaaaccctgtctctactaaaatacaaaaatttagctgggtatagtggcatgtgcctgtaatcccagctacttgggaggctgaggcaggagaatcacttgaacctgggaggtggaggttgcagtgaactgagatcgcaccattgcactccagcctgggtgacagagtgagactccatctcaaaaaaaaaaaaaaggagatatatatatatatatatatatatatatatatatatatatatatatgagagtttattaaatattaacttacacaatcacaaagtcccacaatagactgtctgcaagcttgaggaacaaggaaagcctgtctcaaaactgaagaacttagagtccgatgttccagggcagggagcatccaacatgggagaaagatgcaggctgggaggctaagccagtgtcacctttcacatttttctgcctgctttacatttgctagcaactgattagattgtgcccaccagattgagggtgggcctgcctgtcccagtccactgactcaaatgttaatctcctttggcaacaccctcacagacacacccaggatcagtactttgcatccttcaatccaatcaagttgacactcagtgttaaccatcacagcaggaatgggatacttacctgaaaaaggcaagaatgcaaatcatggaaatttagtttcccagcttagactgtcaatgtatgcttttattctgggaatggatgcacaaaacctggtgatagaagattgatacatttcagaaaatgttctacgtgacacttgacaactttaagaattttttatgtacttgtctgagcatctgatgttgaacagctccaattggacaataactggtttgtttttcttctcttttccttccgcttggcttccatgtcattccagcagaagcccaattgcttctttgctcaaataggattgtacctttttataccaacttggagaagagaatgtgaataagtgagtaactgagtatgtgtgtgagcttgggtgcataccccagatatacaagtgcatttaagaagagctggaatagacaagataatcctgatatttatttagtcaaaaatgaaaatttctaaatactgaattctaattcttctcagtcctttgaaaatgcaaacttcctccccacatcatgtggtctgaaaaataagtggaggtggaaagagaagtaggaggagatttgaaagcagtagaaggaaagataatgaggcggctgctaaaatttttgcacaaggacatgaagacttcccttaatgtttaaaaacgtgatcttgcagccttttccattttgacttcattttcctcatctactgaattaacgagaatctggatgatctgtaggtcaagcatttgctggaaataagaaggccagagctaatagccattggctttgcctaggaccataatccatctgcccagcacagacatcagctttcctgtcattatcacaggaagcccctcagaaccctaaagcgactggcactttttttctcatcggaattaaagttagcagcttctcatcttcaatgtggaaatgtacataatcctatgacagtatactattgtctctaaagagagctacaaatttaattttgagtttgtgttatataaatcatgcaattccattagtatgtcttcgtgctgtgatctaaattcacaaaatctgatcccatcctaagatgctgatattctgctattctctgctaatgatacaatcagaaacaaatattttgttcgtctttgtatttcattttggtcagaattgcctagaagcagagcctgagacagagattcaagactaggtgactgaggaagagttctcaggaggaaaggagtagaggaacaggtcagaacgtgagaaaaaacttaagcaaggacacattctcaactggcctccggcctcagcctcatcccacggggagttctgcagtgtgagttgtacccttctctcctgatctctcatacccatgtctatcagtcattgcttgctggatatccccttccacctgaagggagggttataacctactgtagagggcagctcccattggccaagggcaattccgtgcagaacagggcagttatgcatcattggcaaccagtgtttatagaacttgagatatgggtactctggcagatgggtgcaccagcctgacagtgaagatccaaaagcatccccccttctcttttccatcctggaaaacttcctgattgcttcatcttgcattgttctttatttttttatttttaatttttggaagtacatagtaagtgtgtatatttgtgagtcacatgagagattttgatacaggcatgtgatgcctaataatcattttagggtaaatggagtatccatcacctcaagcatttatcattcatgctacaaacaatctaattataattttatttatttaaaaatgtacaattacattatttttacttagtcaatctgctgtgctagcaaataaaagtcttcttcattctttctaactatttttttgtaccgattaatcatccccacttcccccaggacccccatccgcactacccttccagtctctagtaaccatccttctatctctatctccacgagttcagttattttaatttttatctcccacaaataagtgagaacgccttgcagtattcttaaataattacttccttcttctccttcagaaaagctccttctcaagctcttcttcgttccactcctgaaagacatgagtgattgtataagtcttttaataattgacccaacctgtgaatgagtaatggcttatcaagaaagaatagacatttaaattttgtgatcaaggcacaataatataaagtttgtgccctgagccctgtcacatttgttgttgtacaaatgactaccaggattttttagtctacttttttttttttttttttgctactattggctattctataaatagcttggggcattctgtaaatagctttgtctttctatttctagcatccaacatggtttcttgcatgggacagacattcaataaatgctcatgaataactgaatgaattaaagaataatggggtggctgttgagatatgaatgtttactgtaagactgtgaagattcaaaagattaaaagtgtataagggccaggcaggtcatgtcaacaagtaaaagtgattgtggccaactggagagcaacatacaatagcctatgagggccaaaaccttcagctttcccagatcatgaaaactgtttgagaatgctgacattgatattttgatactttatcctaaaaataaaatctagagatacaaaattgtatctgaaacttccttatttttagatgttgacagatagcctaactaacaacaactaacattataggagccaatccatacttgtattaattgaatttcacttgggaaatttttggtttgtttccactgccatggaatatttcctggttggtaattatcatttgtttcactttcagtgaacaactaaaaaactgagagaacaaaagagcaaaagtcttctatcatcttcttccaaaacctactattcaaaagtagctcaatcaagagcatctttcgattttctctataagattctgctttgagtcttttcctgtcttatggcagctttttattccaccttctttattcctgtatatactttggaggttattattctcaattcctcaattcctcaattccttggcctcctttgtcttcttactcagctcatggagttcttattcccccttccataaaccttgaggaggtccatggctgtgcttcaaaatggatctgtgaacacctgggaattcctttgcaagatggtatgtatgtgcttatgtgcatttttatgtggagaaaatggcgatttctatcacattctaaaaggagtaccccatgtccattcactttttttttctttttttgaatttttattttagaatcagggaggatatgtgcaggtttgttacaacggtatattgtgtgatactgaggtttgcagtatgaaggaatccatcacccaggtagtgagtataatacaaaataagtaatttttcagccttttctcttctcccccaccagtagtccctgctatctattgttcccatctttatgtccttgtgtactcaatgtttagatcccacttataagtgagaacatgtggtatttggttttctttttctgcattagtttccttaggataatggtttgcagctgcatccatgttgccacgaaggacatgattttgttctcttttatggctgcctagtattccatggtgtatatgtaacacattttctttatctaatccaccattaataggcacctgagtggattccatgcctttgctattatgaatagtgctgcagtgaacacacatgcttgtatctttttggtagaataattcattttcctttggatatagctagtaatgggattgctgagttgaaggatacctcaactcttagttgagaaatctccaaactgctctccacagtggctggactaatttacattcctgccacagtgtataagtttttcctttcctctgcagcctcagcaacatcttttattttttgactttttaacaaagccgttctgatgggtgtgagatagtatttcattgtggttttgatttgcatttatgtgatgattagtgatgacgagcattttttcatgtttgttagctacatgtatgtcttcttttgagaagtttctgcccatgtcctttgcccacttttctatggagttgttttttttttttttttggtttttggtttttggttttttttttttttttttgcttgttgatttgctgaagttccttatagattctggatattagacctttgtcagatgtgtggtttgtgaatattttctcccactctgtgtgttgtctgttactcccttgatggtttctcatgctgtgcagaagctctttaattatgtcccatttgtcaacttttagttttgttgcaagtgcttttgaggatgtagccataaattatttgccaaggctgacattgagaagggtatttcctaggtttccttctaggatttttatagtttgaggtcttacagttaagtcttcaatccatcttgagttaatttttgtatatggtgataggtcggagtccagtttcattcttctgccagttatcccagcaccatctattgaatagacagtcttttccccattgcttatttttgtcaactttgttgaagaccagatggctgtaggtatgtggctttattcctgggttatctgttctattggtctatgtgtctgtttttgaaccaatgccatgctgtctgttcacttttgaagcttcatgtacacttgcctggaccttatagctggtcataacatggtttcttccccttagtttagaaaatatttcagtggatccccaatgcctccattcttagattttgataatctaagaatgcaaattctttagattagcattcaggatccattaccatcacttacaatccttgtgccctatgttctgtcaatagcaaactattcacaatctcaagttccctcgtgcttctgtttgtaagtatgtccccagcacctcccaacctctcatccacctgcgtaagtgtagctaataagtgcccttgggttgggtttcccagaagttgaccctaagacaagaacttgagtgtgagtttttaatgtggaagttaatgccaggaagcactagtagggaagagggaagtgagacagagaatggaaagaatctgataaagtgtgtgttatcaaaccagttaccaccgtgggcaagaggagaaactctgtcctgcagaggaactctaaaggacagtgtagaacaacttcagagctgtctcaactgcaaagtcagaaagctgggatatttatccatcaactcctggaagtcactggttgaggacttctttggggaaactaaggcagtaattgggtgtgttccaaagccaggaagaagccgtcaggtggtgaatgtttgatgttccgggtaaattgtctgtagcatagaagttgagtgttgagggaatatgggacgatcagttacatgggtgaggagtgtcactctactgcagcaagttgatcacttgccttctccaagcctaagctatatcttttatatcctaattttcagctcttactcattgtctagcagagcgaatgtttacccatgatcagtgaataaatgaagtgtatttcccaggcttattcaagctctttatttgaaaaatatgagcatgcggaacaatttcaagttgacctggacatttgaactctacctgcaagcacagatctggaacatcactgcctttgactggggcattggagtaaagtcgttatccctgcctattgcccagaaaataatctgtgtccttccacatagcatgtactttttcagcaaactcaaagcaagctaactttgtggccagactcactacaattgatcagttttattaaagccacgcgtaagaggcagccttttaatcctcaaagtaattcccagtgtgagcctttcaaggctaatcaccctagtgattgaacagggtgagaagaatgaaccactttctgaccttttagtgaagtcaagtgcaggataatgcatggatcattttcttgatgattttatcttgacacaactgaatttttcttaggaaagattacagccagacttttggtgttaaaagtctaaagaaatacttttagattcacgagtggaagttcctacatgtttttctagaagatgttaggagtcacaagctcaaagacattaaagaagaaaggtcattttaattattctacaaatatagctgtactttttatttccacttattacttttttctctagaaatggctttttatgctaatactcctatttcgctagcattgtgagcgagtgctccacctgtcggccactgctgacattacaccataattaagccgtattttgttttctttcaatgcggcctcctgctggaacatgctttagagcagtagttattaaacccagaatcacctggacaactaacaaagaacacgaccaggtttcctgaagtacgacggggcctgagcttttgtatttttactaagttctgaccttcactgaagttggaggatcactgctgttgatcatgcacaccagattttctcactttgagcaattgtttcatgcagaacactaatgacaaataattttaaatgtatatcactcaaaaagttaataaaaacaataaaagaaaatggaaagcatgtattacaaaaacaaattaatactattttagtattaatctaattaggaaacatttcattgtgtttcaatgctgaagaagcactaaataaatgctcatggaacttgcaggttagtctcacaataggtgtttaccaaatactgatctagaatgtcacaaccttcctttatttagtcttcactgccaagttttacctttaaatcaagttcctctacactctatagtccaaatttcccttccagcccaagctccattttctgatcatttaagttatctttatttaaaaggcatttatgtatttctataattctgtacataatttactattgcttgatctaaataattaaatttaagccagtcaagtcatattataaaggagactgcaactcaaaagatgatttgcatctaaagcaaaattttatttttatttttttttataatcttaacttttagattcaggaggtacatgcacaggtttgttatctgggtatactgcatgatgctgaggtttggggtgcgattgatcccataacccaggtactgagcatagtacccagttagattttatttatttattttaatttttttaaagttttatattttttttccataacttatttgggtacaggtggtatttggttacatgagtaagtcatttagtggtgatttgtgagatttttgtgctcccatcacccaagcagtatacattgcaccatatttgtactcttttatccctttcccccatccacttctccccccaagtctccaaagtccattgtatcatccttatgcctttatagcaaaattgtaaacattaagtttgaacctcaaaattaattttctcagctcaaatatgaacaatttcaggtcagcgtacatttaaaaattctgcaaaaatagtaaagcttaccacttcaaaccaactactgtggttaaaatgaaaaagaaagtcaaaccaacagagtaaccacaccaaatgtttgtgagaatatatagagctactagaattctcatacattgctgttttgggatataaactggtacaatcaatttcaaaaaaagaaaagtattttgtaaagttaaaacatttacaacctgatgctcctggaagaaaatgtatctaagagaaatgaaaacatgtgtcgacaaaaagacctgtgcaagagttttcatagcagctttattgataacagtcaatctgttataacagccagaatctgttataacctaaatgcccatcaacaggaaaatggataaattatgttacattcacataataaaatactactcagcaatacaaaaggatgaactactgagacacacaacgtggtgaatctcacaatcattatgctgagcaaagaaagatagacacaaacaggtacttaatgtatgatttcatttctatgaagttcaagaacaggcaaaattaatacatggtgatagaaatcagaacagaggttacttattgaattgactgaaatgaggcataagagaatgaggcataagatgaccaaaatttctatttgggaaatgctacatttgtcaaaattcatccaattttatatttaaaagctaggcattgctctgtttatacattttacgtcaagaaaaatgaaaaaatatgggattttgaatcaagtgaaatgttcaagtcatctatttattgtcttaaacaatgagaaagcctggtggaggcctatgaattgtcctttgcactgctatgaagtgtggatgtgtgtgttgcgtgcatgcatgcgtgtgctcatgcatatggtaaggatgctaataaacccaaagctgaaaaggatcttgcaaaggtagaggtgaaaagctatctggattttgtctagggattgaagttagagatattgatccaagacaaaatgcactttcttgaaccaggagagtctgaatatctaaatcttgggtgctcaagtcctttctcaaaggagtgaaaggcaagttgtttattctaggtgaaagccaaggttatttacttaggtctagaaataaatgcacagcaaaaaccataggtgaaagaaagagtgaaaacagatgagttccccaggctttgggaagaggttcaagtaggtcagaaggtgatgggcatcctcctgttggtgagatctcagcatacctgggaaagggtgaaatgatggataaggaggtgggggacttggcactggaattaaacccatgatctatcctctaagtggctccttgagtttctcaatgaagcttcaccagaacccaaatcagaggcagctactatttcactgacaaatcagatgattctctaagactaggtggaggaccatacattgggcaggttcatttctggataaatttcctctgttaagggaaaagaaagacatcaaaggtgaatatgtcatcagtagagacgacagcaaatatgtttccaattttagtgtactggtcaaaagaaccatcttggctgactgcagtggttcttaagcctggatgtgatgtaatcgtatgaaatgcttcaaaaaatacccataacctgagccccacccacagagattctgattgaataggtctacaacgggcctaggtaactctaatatgtgaccaggattggtttacagcagtggttcacaaagtgtggttcttagaccagcagcataagcatcaccagagaatttctttctttttttttcagacagagtcttgctctgtcaccaggctggagtgcagtggcgcgatctcggctcactgcaaactccgcctcctgggttcaagtgattcccctgcctcagcctcgcaagtagctgggactacaggcgcgtgccaccacgcacggctaattttttgtattttagcagagatggggtttcaccatgttggccaggatggtctcaatctcctgacgttgtgatctgccagcctcggcctcccaaagtgctgggattacaggtgtgagccaccgtgcccagtcaagaatttctttagaaatttcagacctcaccctagatctactgaatcagaaacttggaaacgaggcccaaccatccttgtttcatctagccctcttggtgattctaatgtatgatatagtttgtcccccaagttagaaattttgttgcaggggggattttcatgattatgtattcctggattgagttttagagtctctagtttttggagtatttctctttttatgcattggtattattttttatctcaagcaatgatgggctttcttatgaattgcgtgcggatgttgctaatttctgcaattcttcctctgtttcttgaattctctgcatctataatttgtatctcctttgcagctgattgcttttgctctcttttcccatatattctcttcctaaatcagctgcttttacagaagtatgtctttatgtcccttcaggatttctacactgtgctgcaaggttttgcattcattttccaggagagctttgctgaatgcagtgagcaaaactcactttctttatttgttcttccagtccatgcttggttgacacctcatccttcagcttggatgggaaatggcctcaatcttctctagctattgttaatgaagattctccccaggagacatatctcatctgtcatctctgatttattttatcttctcactctggtgatttgccagttatttcagctgcccaatgcaattattcaaaatgtccaattctttttcgtgtatggtaaaaaaaaacaagcttcctctatgtctttccgagttttataataaactgtaatttgattagttctctcagccaagtgttcccttcatccagttttctgcttcctgtggtactgctccatgccctctttaggtctagatttttctctttaaccttcagaggccagacttcctcttctctttgccgagcttagcttcaccaaggcttttattcactttgaaagtttcaaaaaaatccttgaaaatatttgtgatatttttatcaagcttttgccttccaacaccttgttctagttgtttgattttgttttatttgttttcttttgtgttctacattttgcacttcctagttttcccaaaacaacaagtacacttcctaccagcatttcactggctattttattcatttttgaaaagattctagttggaaactttatgcagttccttcttcagaggggtgtttcttttgtatcttgatcttcactcctcaaaaaagtctttgctactttttttgttcatatttgacaatctttattgattttaaggtagtcttaaagtttgataaaactgttgtgctgtcgttcgttttttttgtctctttctagaagaaacaccctctggaagaaaatggctgatgaacaatttcttgataaggcactatgagttattgactcacaaggcccttcatgaaaatcagggttgccctgctgtctacagggaatgtagcttgtggcatcccatgatctattgcttcaggcctgtttggaagaatcacattcttcacgcctgaaacacctggttgctcttctgtatttacttgtttctgtatttgttgtttctttgttgtcgtagaatcactagcctctcccaataggccaaaaccatctttcgagtacgtgttatctcaatttctgcattttctagaggcctcttattttcttctgctaattattctcattcattttatttacttgagtcttcagtatcagaagtctcttgcattctcaatgatgtatttttcaatgacagaagaatgttcttctagagcaggaactggcaaactatgattcatgggccaaatctggccccaccacctatttttgtaaatgaagtgtatttataaataatgttttgtaaataaagttgcaaatgaaggaaatgcagctatctccattagtttgagtattgtcttcttttttctttctttcttttctttcttttttgagacagtgtctccctctgtcacctaggctggagtgcagtgatgcagtcgtttgaggctacactgtagcctgtagagacagggtctctttatattgcccaggccagtctcagactcctgagctcaagcaatcttcccgtctcagcctcccaaagtgctgggattacaagcatgagccaccataccccatctatttgcatatcgtctatgactgctttcacactataaagtcagggttgagtgattatggcagagaccataagaccgctgaccatatgaaaaatactgccttgctcttcacagaaacagtttgcagacatctgctctgcagctttctcaataccaagtgcaactctttgctctaatgaagtgggttggcacctggccctgctgggtcattctctgattttctgtatgcccccttgggcttggactcgtggatatcaccttcaggtatttagtaggcttactaatttccttcctagtttcaagtatgggctttttcaaacgatgtccattgaggaatttctcagtctgccctcattctcacccatatcctgagctatctttcttgctgcaaagtatcaaagcctcagtttctttataaaaacaagcacattccttatctgttggcagttctcacatgcttaaaataaccgtttgcattaggtggacactgaagagaatgagaattcaacccacataatttttaattttccacgtttcacatctctcaaagcacatcttgtctgaaggacatataaagatatactatgaaggcactgatgcaaaaaaaagtgcagaagttccaaaaacatcaaaatataatatataatcagcttatattttagtatattacaagatgattctaattctctgcccctttctgaatccactgtctttccaatgtgactttgccactcttcttaccaagagattttcccacccagtgactctgaactggccttgggattagctttggtgaatagaatgagctaaaactggtgttgcagttttgaggctgggcctccagagactttactttcatttttattcttctatcctggccaccactagcagaacaagcctgagctagcttgcaaaaggatgagaggcccttagaaagagagttgaatttttcaggacaaaaccatcctagagcagaggcttcaaaccaacccaccagtggacctttcccctaaccgaatgacagttctgcagtaattctttcgaaaccgaagtctcctgtctcatttccctatttttttttcacttcagtatttggtctaaacctttaaacttcatgctatagtgtaaatgattaatagacaaagtatttttcttattaacagaactctgcattttaactgagatgatagatattttatctttaaacagaattagtttgttagggttgccgtaataaagtaccacagactaggaggcttaaacaacagaaattcattttctcacagccctggaggctgagatcaaagtgtcatgaaggttgggtttttctgaggctgctctctttggctcattgatggccgtttcctccctgtgtctttacagagccttccctctgtacatgcctatgtccaaattttctcctcttataagtgcaccagtcacactggattagagtccaccctaatgatcttatttttacttaattaccactttaaagatcctatttccaaatatggttacattctgaggtaatgaatggggattaggacttcaacaaatgaatttggagggacaaaattcagaccgtaacagtgacttttggtaaatgccattcagcaaagagtggggatggaagaaagcttccagaatgaggttgctctgcaacgcaaaaggccagtggatatggagaaaggagatagggctagaaacttcaaaccagtgaagcagctaattttcattgaacacttacagttgctaggcagtgcactgagcaaattaccatcatttgttcctcatagcaaccatattagacagttcctattatatttaccatcataatttttttcaggttatacaatgatataagcagcagagctggctgttttttcttttcctttcttttttttttttttttttttttttttgagacagagtctcactctttgtcacccaggctggagtgcaatggtgcgatcttggctcactgcgacctccaccacccgggttcagcctcctgaatagctgggattacaggcatccaccaccacccctggctaatttttgtatttttagtactgatggggtttcaccatgttggtcaagctggtctcaaactcccaaactcaggtgatcccaaagtgctgggattacaggcatgagccaccacaccccgcccagagctggatttttaacccactgtatctgacttctaaacccactttctttcctctagcaaatgcaaatagaaattgggtcccacgcaaatctaagtgattggcggttgcttcaggatcatagccaggagcaaaatgtgaggactagcagaactcagtaaatagtaagtgaagtcagatgggatacatcatcagagtataattcccaaaaacttcaaaagcactacttcctcataaatatgtaggaaaggtgtgtcaatttgtagcagaaactcattaatggcagaaaaaatgggacagtaaacctggttcaaaggagggttaaatagactgaagcacatattatcagtgaaagaatgtggaaataagattgttaattagatagaaaactagttaatgtactacggggaaatacaattgtggtcctgttttattgccctgtagtacaggacagaaatcattcgcaatttaccagtctttgcaaagttaatctttaacttttttttattacagtctgggccctaatcaataggaaatagtgaatcaaaaaaaggtacattatgccagagctgttttatccaatacagtagccaagttgcatgtagctttttaaacttcaaattaaattaattaaactcatgtacactacagtttcagttttttagcgaaactagccatgtttcaggtgttcaacagacacatacggctggtggtcaccatatggaacagctcccatagagaacatgcccatcatcacagagagttcccttgggccacactgccctagagcatcagatgaaccacaggcaggtttatcaaagaatattgtagcacgacatgaaaatgcaaagttttggataatttttcataatagcaagagccatgaattgtaggaacttgagttacacttggagagtcatgaaaactgagatgagagcttgactgtgctggcagccagtatgccaaagggctttttttcctgagatatttgcatggaacttctaccatgacccatcccagtttcaaagcattcttaccacatgcggctgggatgctgtatgttccctaatactgcccacacgtgagcctttttccctataagtggcatctcaagacaatggtatttaaatgttcttttctccaaattaaaataaaatttgagacagagtctcactcagggtctctctgcagcatcaacctctcaagctcaaatgatcctcccacttcagccttctgagtagctgggactgtaggtgtgtgccacaacatggctatttttttattttgtgtagagacaaggtctcactatgttgtccaggctggttctgaacacctgggctcaagcaatcttcgtgctttgtttaaatattttgttgccatattccaaaactaatctggaaaaagtatagatcctctcacaacttttaaattgaattcaatgatgtaatagcattcttacatcatattttaaatatacccaaaggaatcttaatactaaatgacactttaaaatttagcatcattcatcaaaaagaacaaattctccaatgacagtcagaaaatttacatcatttcttttattacctgaaatcaaatttttattatgattcccctacagagttttatcctaatttattttatatttgaaagttgtttttagtcattctacattcttctaagcaccaaaaatatatataacagattgaaattttttgttgatgatcataaaatttgaaatattttaatatatattgaaataaaattgtaattattagtaattcacaattgataaaagcattataaagctattacaaattttgataaataaatattaaacagaaaagcaaaattttatcacaaatgcatctcttaatgagataaatgggactttttcccaattcatatatttgtggatgtctatgaaggtcacaattctttctttttttttttctttttttgagacagggtctcattctgttacccaggctagagtacaatggtgtgatcacagctcactgcagcctcctccacctcctgggctcaagaaatccttccactttagcctcctgagatgctgggactacaggtgtccaacaccatgccagttaattttctttttctttttttttttttttagagacaaagtttgccgcattgccgaggctcgtcgtgaaatcctgggctaaagaaatctgcccacctcggcctcccaaagtgctgggattacaaatgtgagccatctcactcggcccataaatatttatttattgctaaaagaacataggtctgatcatggactctatttgtattatcatatgtgtgtgtgtgtatatatatatatatatatagttactgtgaaagcttgttcttataaacaagtacataagattaaaagggattttaatacagcaatggcattcaattgcttgaactttccaaatatatgccaaaatcacattgttgcccatcatacaactcttttttttttctctttttttctgagacagagccttactctgttgcccaggctggagtgcagtggctcaatctcggctcactgcaagctctgcctcctgggttcacgccattctcctgcctcagcctcctgagtagctgggactacaggcgcccgccaccacgcccggctaattttttgtgtttttagtagagatggggtttcaccatgttagccaggatggtctcaatctcctgacctcatgatccgcccttctcggcctcccaaagtgctgggattacaggcgtgagccaccgcacccggccatacaactcttttaataattctatcagctatgagctttatgaagccctccgtcaattttgctgaaagctcataaatggaaatccccagacttgtaaaaggatttctatcccaatctctagagtagttcaagttctcattatctgggagaaacagcaaaaaggtgaatcaactactatttacaaagtttattactcttttaaccagagatatactctgaaaagctttggaaaatcaaaatattgcttatttctgtactttgtattgtactttgcaaaaaacattttattaaatgcttttaaaatgtcttaagatatcacaggccttcaatacatttttttcatgaaaatctcagaggtatagatcaatgagttaaaaagacccctgaatgacgtaattggcaaggctaggcctaattttaaaacccattagccaaacccatcttctctgtcagcaaaaatgggacattatttatcaatacaaaaagatggctgggtgcagtggctcacgcctgtaatcccaagcactttgggaggccaaagtgagtggatcacgaggtcaagagatcgagatcatcctggccaacatggtgaaaccccatctctactaaaaatacaaaaattagctgggtgcggtggtgcacacctatagtcctagctacttgggaggccgaggcaggaaaatcacttgaaccagggaggcggaggttgcagtgagccgagatcgtaccattgcactccagcccagtgacagagtgagactccgtctcaaaaaaaaacaaaagtcaatacaaacagctatgttatgatacatatgaaaatatctatcttacagaatgtatcttgaggggcatattaccaaacacatgaggaaaagaaattatgatgttataaaatgaaaatgataaatcaatatactgttttccattactgaatttgtaatttttattcaatgtagctaaaattatgaattatttataaacaacaaaatataacagaaaacatgttatttctttgaaatacatacttatttacacatctggacttgtgtgtatgtatgagagtatatttgtgtttgtgtgcgtgttgtattctggtgttctgtttttgagattaatgaagtaagacttgtattaaaaattagaaagaatttcttaaattttattagatcccataaatgaactttctctatatatttactttacaagaaaagcataaactgctaaaaaacaaattggtctaacagcaagtatataatttaattattttaattgcgagaaaaaaatgtgacatttgtaagatgaaaccagataaggttactgtaacaagataaatagctcatgatattatttgataaaaaggttttatttctcttatttaataacaacaaatgtgaaagaagtctcacaaaattttacctctgatttgtatccagaacaaacgctaatcctagaaaacagaccagttaaagtgaaatgcattagaatcccccatctatcattttcatgcattcaaaggtccttttcttcccttttctagggatgaaggttgagagaccaaaacattgcttatatttaaacacatgaaagaaattgatattttagctttcagtgtttctagtgatctctttgctttgttctcctggaatcttcctcaagagagattcctcctttgatagtattcaggaatttaagaggttaggttgctcactcctacttccatactctacaaaacacctgaattaaatatttaggaatgaatgaaataccacatgtcaaattctggggacctaaaagtagaacatagaagaaaatgtgtagtttaaaacatgtattaagaaaccaaaaaagagtcagaaaaaaagtgagccaagcattcaaataaagaacatggaaaagaagcaggaaagcacatccaataagcaaggacatagaaataaaggtcatagcagaaatttatgaaattgtgaaaaatggaaataatggcaagtagcaataattaaactagctctttgaaatgcttaataaaaaggacaggtttctggggagactgaagaggagaaggggaaatttgcaaataaacaaatccataaactaaaaaggatagactacatatatatatctgcaacagaaatttaaaataaaaaagaatactgtaaattactgtctctaaatttgaatatatagatggtgtgaaaaaattcttagaaaaatgtaaactgccacaaattagagagaactaaaatgggccagtaagaattcaagaaaaggcctcctcttcagaaatgcccccagatccaaccggttttataagtatgatctcccaaacatttaagaaagggttaagtctattgtttaccactttctctagaaactagcaaaagagaaaaggccatctttctgtaattgatcaaataaaacagagtttaaaactgactgcaacactcaaaggatgaaaagaggagagtgatgtgacctgatttgcaacaattgaattcttgtaacttagaatgaagtcacttttgccactgcttagggcctggactggatgaagtttaaattacaggtaggaggaggtccagttatggagaataccacagtggtcagggtgagagatgataagaacctgaattaagaaaataaatgtggtggtggaagagatggattagagagcttttgaggaattagaatggacaggtcttataactgattatccttaagaagtgctggtgagcagcggggactctgaggcccaagagaccaagggagtcacagttccattagccagggttgggggaagggcaggaaccagaggagggtcaccaatagccaaagttggagttagaggaggaggatatttggtgattttgagatgccataagctcccccagaagcagatgtaaacagataaatataagaagtcagatcataggaagaaaatctgggccaaagatttggaagttttcagcatatggaaggtaatggaagacatgagcattgttgagatgcaacagccaagaccgtgtgtagagaaaaaggggtaaggaacaaatggggacatgagcagatatttttattgcccttcagatctcctctgctagcaattataccctttacctgaggactttctgtacttggaagatggttgccaatgcagtgaacaggctggaaatgccatagagttaatgcccctaggaagagccctcagctggtgaaagctgggagttgttggtagatagatcccccagcctccttcctgcttgcttgggacagccctgagctatgtcctacactgtctcacagagcccccagtggaaatgagctccagatgtctacaaatgtaccttttattgataatgtatattttatcagtgtttcccttccttgtcttacttctccacttccataacactgtttagtggaattgccctctgaaataaattactacactcagattcttatctcagggtcagcttgcggggaaacccaaactatcagagtaaaagaagtgccaagaagggggaactttggagagaggctgtagaggaaactaggagagtctggaaggcaaaagagtaaagaatttcaaaagggaaagaacataagtgaggcattgaaatcataacatgaggcatggaaagtaatgaaattaatagagatagaaaatagaatgatagtccccaggggctgggagtaggggaaaatgaggagtggtttaatgggtatagagtttcagttatacaagatcaaaaagatgtagagattaggtgcacaatatgaatggactgaaaactcatgagcaatacacttaaaaatggttaacaaaaggagaaagttgaatgaaacaaaactattggtagtcttagattgagccatgactgcaatctaccagtttctcaatcgcatgctgataattttccaaaagttagtgtcaattgtttgctgttacttactgtgtaaaaaattatgactatcacttcagtcataaaggaaaagctggtttctgattccaactagttatgcaacttggacaagttgcatcttttccctggcttagagcctccttccttgtaaagtgactgaaatagacttggtgatacctagatctttgtctcctctaacattccataattttatggcctaaagtataattatattaaaatgaccatttcacagtatgtcctagttttgctcaaatattctttctataatcattttcatgattctaattctgcatttttcctatataatggaattaacagataagaaagaacataaaaagaaggcataaacagtggcatcttacagggtttaattcttgacttggcactatagttatgagaatatgaactgtacataagttattgaagttaaagccattcattcactctttaaaaatggttaagatgataaattttatgttgtttgcattttaccacaatcaaatattttaacagtggaaaaaaaagagaggataacacatagtgtcaaatgctatgacaaagtctctaaagataagaaatgagagatttatgggcttggcaaaactggggtgctgatgaacttagaagagagatttcattgtagcaagaatgacacaagctgagcagcaattgtctgagctgtaattgggcaggattagcatgtaggaatctttatatgaggggtaggaggaaatcagagagaactgcttcttgagtagtcttatactcctacgagaaaacattaaaaaaagttcctggattaatagataacctagttatgttgatctctgtggcattccgtcattttttcatccattctatagtctagtgagagagagagagagagagagagccagcaaatgagagagagagagacagcaagagaaagataattgtgagaaaaaccaggcatggctcctgcacctaacttctcgccgtgtagcagtccagtgaggagaatggagggtaagcaaatgcttgtaaaacctaataatgaaaatgaatactcatacaaatagcacctgtggttaatgctctgtgaaacagagagaaatacggtgctattaatccatagaattgcagctggacgtatccaggaagacaacatcaagtttgatggtgcaggatgagtagaagttatctgaaaaaggggaaagtggaggaagtggattagagacagagaggagaacatgtcaaagggcctgtgaggggaggaagtatgacaatttgtgagcctgaaagaagactccagtgactgaaacagaaaaagcccagttcaagagctagcaaggtacgtagggccccaagggtacaggcttttttggccatcttacagagcactgacttcatcctaagagcaggagggtctgggaatcttttacttggggtggggataggtgagtgttaaggtggtagttgggagtgtggatggaggatgggcaatcatggatgagacaggtcagttaggaggatccagcagcagacctggcatgagataacagtggccagtactagggtggtgtcagtaaagatttgagaacatggaagggttcaagacatatttggagatgcgatatcatcagggtcttgagtttcctatgaagaagtggacttaaagagtcccaacaggatgaggagtaaattaggcagaatccagaggtcacccagactagagtaacaggttcatcagaacatatgtcatcacatattgtggtgtcaggatggggaggggcttaggagagatgcaggtagttgagtcagtacaagtatagcctccaggtaaacaaggctaattaagatcatcatgattacaggcatggagggctgcactgtggcaagtcaaggcccatttagtatcagataggtgggaattctcaatgttacaaaactattagagccctcaaaggattagacatcagaaaatctactatctagacccattttctacctattgccctttggcagtcatccattcattcatgtatttgtccattaatgtatcagtttattcacttattcaacaaatatttattgagtgctaatatgtgaaggctatgtgttagacactgaggagatgaggaaaaagacacaccactgctgctttcatgaaagtatgaccagtatgtgctggtaaaggtttaacatctgcctctcctcactcacctctcccaaaatcaaataattgctttgtagttcattccactttcaatgaagtaaatattcccattgtgtcttatttcaagttaccaacatgatgtcaacacttcacaaaatttctggaaatttaccagctggtcctcaggagctgctacaagccagctccaatgtcactggacctgacattctagtaaggaaaacaggaaaaatcaataaccaaatggggaagtaaatattatgatagattattatttcattattggcagctagtgaagggttcaaaggggtgctctgatagcaagccataaagagggagaagtgtctttagttagccagggtagtgaggcaagatctcctcaacggagaccatgcaaactgagacctgagtgagagaaagggtaatgaggcaagacctcttcaactgagaccatgcaaactgagacctgagtgagagaaaccaaatggcagcattctaggctgacagaatgctcaccaaagaaaatctcttagagtttggggtatacgtttctctctgttactttttctgtgggatttttttcagacttttggaattccttcactgaagttcacattccctttctcattctctcctgaacttctctttttgttacaccttcccatgctggtcttgaacttgactatgtgatttacttttgtcaatgggacaatggcaagcagagacttgtaaaagcattcagtacatttacacattcactcttggtcctttgccttctccacaagaacacgtgtgctagcatgctaaaggatgagagacacgtggagcgggctgagttggctcagttaggacaaccaagggacagacatgtgagacagtccaactaagatcaccacaagcacctagctgacccacacctgaacacagacacacaagtgagccttgctgagcctaggctgcatcagcagaaacatccgacccacctgtagaggtctgacaaatcataaatgattgttgttttaagccactcagttctgagatggttgttaagtcatgtagcagaggaagaaaacatttttctcacttatcttcagttcatggctagggcccctataacaaaagacagattagcaagaaaagaaaaccatcaaatataggttttacgtaaggaaatgaagacccaaagaaacagttaaacagttaaacttatatatttttatgctgtttgttgaagaatggacagtcatagagaaatatagtagacaacggggtataatctcatggtataaactggggggaagctagcaagccctgtttgttcactttcttctctgtgaccctgcatcttcagagatgaagatgtttcttttacttgagtatgaggatggcgtctctcaaatgggagtcttatgatctgcttcaaggtaaggtcagataattctttctagattttatgacctgcttacggaaagaatggtggggcgaaggtgagagtgactttctggcttctgccattttctcagatttcttcagctttacaaattcagtatgccaaggtgccttattttgaggtagtatgtcttgaactccatcagtagcaatagctaacacaaatggcttcctgatgtatttttccaagcctatgatacatagaaagtggacaacatatatacatatatctatatgtatacaagtatatatatacccacatgcaatttggagattaagaatctgtagaaagaggagtacttttctgctaagctgacaattatatagaagcttttaaatgtttaaagatctagtaaaatagtactttttaaatttataactaagagttcagtgaactaaatgtacagtctcagggcaagacagaaatgggaattgaactgtgcaaacagagatttgtctttcagccccagttagcttttaaaaattcactggatggtcttatttttgtattaaaatacatattggaatcagacatatatgccttttctggtttctccattttataagagaaattttataagatactccagaaactaacttactctaatttcatccaatttctaaaatctgtgctgtctctagaaatatttagtttccatcttcttccccaggagtctttcttcattccctgttccactaagaaaatgactgtgtgcttcctttgtacacatgcacactgtgttaacttacaaagattccttggaaaactaatcaatcagagattttaaaagaaaggagtcatgctaaatttcccttgaacctcagctttttatttcttttaattacttagataaggtctgagtattgggcagaggaaaaattgtgacttaaaaataagatgtaatacatatgtaaatttacatcaccaatcttgactcattgatctttatggtattgtagtgagctttaggcctgaaataaaacatgtaatcaaaaaatgtttgttgagcaactgtcttaaaattaacatacttagaaagttatgttagtattttggcattgccagcattaatgcttaggttaactacttatccccaaaacagcatttagaatgttcctataagcctgtgtggttttgttacattttatacctaaaaattccacagcagttccaagtgatgaaccaaaataatttttgccctggaagttaaaggaggtaaaatttttctcataatgccaatctattgaataagcccacatcattcttgtcatgcaaaagagaaatgctttgaagaccaactgctgttcatcttttcttttcctttatgttaatgatttctacacaaactaattgccttaaaagttgctgatcatgttaccagaacaatgataaattgctaaaatagttaccattgaaccacaagcacaggttttgcatctctatttttgcaacttggaatttaaaaatgcttcttgaaaaactaaagcaaattaaaaagcaaggactcccgctcagtgctagattaacttcaaatagatgcttatcaatgaaggccatcacagaatgaaaattgttttttaaacaattcatagagatttggcatttttaagtgcatccttatatacatataaattagtatatgaagataaccttttaagcatgcatgaagcattgcaatactagttagtaataaagacaaaccaactgatatatggatgacttttatggacaatgctacagggacagaaatgaactgaaaagagtgtatgctgcatgattatactcacgtaaagtctagagcattaaatactaatctgtgatgattgaattcagatagtgaagacttccaatgaaagaaattagaaaaaggcacaagaaattttgggtggtgatgacagtgttctatatgttgtttatggtaatggttacacagccatattcaattacacagtcagaactcattgaacagaacacttaaaaactgtatgttttattttatgtaaattttactttaataaaaaaaatcaggcactcaaatatttgagctttgctattttgattataaaaagtaaagtttgattttataactaaaaaaattactaaattatccaaatgcacacagcactaaataagtggtggttgaccgattatgtgtgctccactgggaatactgcttgattgtgtgataaaataggaaaatttgcaaaaggatgtgaaattttatagaaaattaaaataagcatatagagaacatgcatgtgcaactgtggcagagtggagtggacggttgcattgtataacaccttgtaatgacgacagacatcacatggacatatacgtgttcatatagatcattagtttctatatttctatagagacttaatctttcagtacggtgcttggctgagtctctgggcccataactttctcttttattctgtacagtttctctttttttccgttttatagataaaatttcatttgggaaggtggttttgtggctaatacaatactaaatttcgctgtagaaattagcattttaattttcaaaaaattctaagtcaaggcaaaacagtatgttttaaagctttttttttccagtaatgaacaagtaagtaacagtggtagtgggctgctaaccctctatactctcttgattagtccattttttaaccagtggcatcccttttcagaggggaaatgcaactgaaattcttatgaagttgctatatttcttcctagtgatgctgactataaatgtttcagtcataaccttgtattatgactgtataggccaaaagtcttctcataggatgggtaaccaacatcgttagaatgtaacagactcttgcatgctttgttgatgctcttctagaaaggtaatttttagtactaatatctgaatcataggactaacattgtcatgaatttagaaaaatttttaagaacttaagaaaattatttcaataattttttggggaacaggtggtgtttggttacatggttaagttctttagtggtgatttctgagattttggtgcacccatcatctgagcagtgtacactgtacccaatgtgcactcttttatccctcacccccctcccactctttcccgagtccccacagtccgttgtatcattcttatgcctttgcatcctcatagattagctcccacttatgagtgagaacatacgatgcttggttttccattcctgagttatttcacttagaatgatggtctccaatttgatccaggttgctgagaatgccattatttcattcctttttaaggctgagtaatattccatagtatacatatactacattttctttatctactcattgatgggcatttgggctagctccatatttttgcaattgtgaatcatgcttttataaacatgcatgtgcaggtatatttttcttataatgacttatttttctctggatagatacccaggaatgggggtagatctacttttagttctctaaggaatctccgtactgttttccatagtggttgttggactagtttatatttccaccaacagtgtaaaagtgttccctttttaccacatccatgccaacatctattatttttttatttttcgattatggccattcttgcaggagtgaggtggtatcgcattgtggttttgatttgcatttcccttataattagtgatgttgaacattttttcatgtttgttggccatttgtatattttcttttgagtattatctattcatgttcttagcccaatttttgataggattgtttgttttgttcttgctgatttgtttgagttccttatagattctgtatattagtcctttgtcggacgcatagattgtgaagattttctcccactctgtgggttgtctgtttactctgctgattatttattttgctgtgcagaagctttttagtttaattaagtcccatctatttatctttgttattgctggattttcttttgggttcttggttataaagtctttgcctaagccaatgtctagaagagtttttgcgatgttatcttctagaatttttaaggtttcaggtcttagatttaagtctttgatccatcttgagttaatttttgtataagacgagagatgaggatccagtttcattcttctacatgtggcttgctaattatcccagcaccatttgttgaatagggtgtcctttccccactttatgtttttgttttctttgtagaagatcagttgattgtaagtatttgggtttatttctaggttctttattctgttccattggtctatgtgcctatttttataccagtaccttgctgtcttggtgactagggccttgtagtatagtttaaagtcaagtaatggaatgcctccagatttggtctttttgcttagtcttgttttggctatgtaagcccttatttggttccatatgaattttaggattccttttctagttctgtaaagaataatgatgtcattttgttgggaattgcattgaatttgtagattgattttggcagtattgtcattttcacaatattaattctacccatccatgagcatgggatgtgtttccatttgtttatgtcatctatgatttctttcagcaacattttgtagtattcttatagatgtctttcacctctttggttaagtatagtcccaactattttattttatattattttattttttacagctattgcaaaatgggttgagttcttgatttgcttctcagcttggtcactgttggtgtttagcagagctacctatttgtgtacattaattttgtattctgaaacttcactgaattcatttaccagttctaggagctttatggatgagtctttagggttttctaggtatatgatcatgtcatcagcaaacagtgacagtttgacttcctcatcaccaatttggatgccctttatttctttctcttgactgattgctctggctaggacttccagtacaatgttgaatagatatggtgggacaggtgtagtggttcatgcctgtaatcccaacactttgggaggccgaggtgggcagatcacttgaagtcaggagttcaagaccagctggccaacatggttaaacaccatctttactaaaaatgcaaaaaaaaaaaaaaaaaaaaaaaaaaaaaaacttagccaattgtggtggtagatgactgtaatcccagctccaagctacttgggaggctgaggcaggagaatcgcttgaacctgggaggcaaagattgcagtgagctgatagtgcgccactgcacttccagcctggagacagagcaagactccgtctcaaaaaaaaataaaagtggtgtaaatggggatccttgtcttgttccagttctcaggggaaatgttttgagtttttccacattcagtataatattggctgtgggtttgtcatagatggcttttattaccttaaggtatgtcccttctatgccaattttgctgagggctttatttataaagggatgctggattttgttaaatactttttctgcttttattgagatgatcatgtgatttttgtttttaattctgtttatgtggtgcatcacattaatttacttgcagatgttaaaccatccctgcatccctggtataaaacccacttgatcgtggtggattatctttttgatatgctcttggattctgttagctagtattttgttgaggatttttgcatctatgttcatcatgtatattggtctgtagttttcttttttttgttatgtcctttcctggttttggtattagggtgatactggcttcatagaatgatttagggagcattccctctttctctatcttttggattagtgtcaataggattggtaccaattcttctttgaatgtctgatagatttcagctgtgaatctctctggtcaatgataaaataactagtccaacaggaaaatatcacaatcctaaaaatatatacacctaacactggcgctcccaaatttataaaacaattactgctaaacctgagaaaagagagggacagcaacacaataatagtgagggattttaatactccactaacagcactggacacatcatcaagacagaaagtcagcaaagaaacaatgaacttaaactataccctagaacaaatggacttaacagatatttacaaaacattctacccaacaaccacagaatatacattccattaatcagcacatggtacattctctaagatagaccatatgataggccacaaaacaagtatcaacaaatttaataaagtagaaattatatcaaatagtctctcagaccacagtggaataaaattggaaataactccaaaaggaaccctcaaaaccatgcaaatacatggaaattaaataacccactcctgaatgattgctgggtcaacaatgaaatcaagatgaaagtttaaacattctttgaactgaatgataatagcgacataacttaccaaagcctctgggatacagcaaaagcagtgttaagaggaaagttcatagcattaaatgcctacattaaaaagtctgaaagagcacaaatagacaatctaaggtcacacctcaagaaactagagaaacaagaaaaaaacaaacccaaacccagcaggagaaagaaataacaaaagatcagagcagaactaaatgaaattgaaataaaaaaagcaaaagataaatgaaacaaaaactggttctttgaaaagataaatgaaattgataggccattagcaagattaactaggaaaagagagaagatccaaataagctcaattagaaatgaaacaagagatattacaaccgataccacagaaatacaaaaggtaattcaaggctactatgaacacctttacgtgcataaactagaaaacctagaggagatagatacattcctggaaatatacaaccctcctagattaaaccaagaagaaatagaaactgaacagatcaaaaacagtgagattgaaacggtaatttaaaagttaccaacaaaaaaataagtccaggaccagacagattcacagctgaattctaccagacattcaaagaacttttgattgagcatcaattcaaattttgcataaaacccaatttgttaaacaaacaagcaataaaactagatttttctggctgaagtaggattggagacctggacatcttacatatttgacttctctaccattttctgcaacagcccccagggaatcaaaacataaccccagagaccacataaagatactgatttggagccgtgcttctcaactaggaacacttttgtttcccagaggacacctggcaatgtctggagacattttttattgcacagaggtgcaactatggcatctagtgggtagaggccagagatgctgttaaacatcctgcaatgaatgggacagcccctacaacaaataatcactgggctcaaaataccaatagtgccaaggttgtgaaaccctgatatgaagaaagatttggaaagataaaacacttaggtatattttgttccatctctgaggccgagttactcaaaatgcgcttaaatattttattatataaggtgaagatatacagcttgtctctgatagttacataactgagcagctgcttctagcgttgctattctgcctttacctatgtacctagaactaattagaaagaacagtttaaagtgtctccttagtgtcctcgattggatcttcacatacttggtctttgtttttctcccctagccaggggtcagaagtgtcaacttcatcacactggtctttaaaataaaaagaaaaatatcgaccattttctgaatatatcaatgcaattatgagccaaattcctatctgctactaaacccatgctatagttaataaaaggaagaagccaaaattcttcaatgagagtgtttttcccagagatgaagaataatacccgtctgcctacaggacaatgattatatgttcatcatttagcatagcaggtctaagtaaacatttccatcagatttcattgttatgaaaaacaatctactccactacacagtatattaagcaccaatcaatgaaaaccaagggaacagattattaacactttttcagtacaaaaagcaatccaggctgcttgccactatcacatactgcttttaataggaatagtttttaaactcatcatattggaatttggctaattagaaagctaatttgtaatgacacctttcagtccaaagatacaatggcataggcaagttttcatgcttagagtggcctgatctttaaaaatatgaaccttttcaagtcctgattctgcaaatataattcactcacccgattaaaagttcattcaatttgttattgcttcaaagaaactatcccaaccccagtagcttaaaacaacaattatatttagtgcatgattcaatgagtcagcaagttaagctagacccacctgaaaggttatttacccttatgaatatgcagtcaatagtagattaactaggtggctttgctttttacagttagctagctgttggctggtatacaacggggacaattgagttccactaccaacctatccctggtttgtttacttagagagccaggggtaccaaaagagagcagaagcatgcaagacctcttctggtttttttctcagaactggtacaaaattgctttggtcacattctataaagtaagttaaaggctagcccagattcaagggatggagaaatatacaatggtgacaactgagttccactaccaacctatccctggtttgtttacttagagagccaggggtaccaaaagagagcagaagcatgcaagacctcttctggtttttttctcagaacaggtacaaaattgctttggtcacattctataaagtaagttaaatgctagcccagattcaagggatggagaaataggttctaccacttaatgggaggaactgcaacgtcacattacaaagtgtgtgggtataaagccaagcagagaattgaggctattttggtgaacaatacaccacactcatccagcacgctgctgtcacctttattttcacgagatctggcttccctgtggtgattaacataaagacaatgtaacacaatccagaaacgcctgggcattaatgcccagtggagcaaatgtgaagtaatgggagacagaatacgtaaagtggctggcagataaatatttttctcgtctccttctttgacaacctgttttaagattctgtgtctcttttaggttcttctagaagacatctgctataacccagctaccacattttttggggaggctaccacatttttaaaaaatctttggaatgctcctccttgtattttttttcactttccttgcctctgttttcctttttttttcattctcatcgcacttgcactccccaatagagcatggaaaggttagtttttgctacataacaaaataccccaaagcttagtggcttaaaataacatggatttattaggccacaatgctataacttggctattcgggctgtgctcagctggacagttcttctagtctctgcttgactcactcatacaactataccaagttactagattggctaagttttggctagtataggacacatggcccattactgctccacatgaactcatccccaagtaggctagcccaggtttgttctatggcagctgagcagggtcccaagaaaataagtgaagccatgctaagcttcaaacaaccacatgatcactttcatctcattccattgggcaaacttcatcacaaggctatcccagactccagggttggggaaatagattccatcccttaatgaggggacttacagagatacattgcaaatgtacatatatagaggggaacagagaattgaagacatttttccaatcctcttcaaagaataagcacgtacattttgccttagggtttattttctataagactcaggctatgacagtgtctattgcacaaatatcttaaaaaacatcaacacccttgagtaggcttaataatttttactgtataatcattgttaaactagcattagttaaagtaaacaaagtattacacagtcttgtcatctccacagtataaactatccattattttccaattttcttttctattttattttctagcataaaaacatttgcagaaatgcctccttagatttctccttcttctcctcctcctcttcctcctcctcctccttttcctgctcctcctcctccttttcctcctcctcctcttccttcttctccttcttcttcttcttcctcttcttctttacatttaatggtttagttgagcaaagagtgatctgtgaatcagacagctcccagaagcagaatgtgttcagaattactctggggctgccatggtcggataacatttatggacagaaaaaggaaagtgacttacagaaaatgggagtaaggtacaaaacagctggattcattacagttcagcagcgtttgccttatttgaacacagtttgaacacttggccacctgtgattggccgaaaccctgtgattggccgaaaccctgtgattgatacaaaggtatgttacagtttgtttgcatatccagttaggttacagttcactatgtatggagaacctttaaactgaactgaagttacataaggaggcatcttttggttgaacttaatttgacagttccctgctttggtcaacctttcaattttgagagatagaccaaaactttaagcattgatctcttctgtcatcattgtaaatggacttatttggtctcaaatttcactagggaatagcagaacagtgagtttcataaggtaggaataaggaacagacaatagaaaaaaaactggttacttctgctgtttttgtttttttaagggttacagcacaggagactaccttatcatgctggagactagtgttttcaggagaaaaaaaaaactggtctgtttttagaatatatctgctttcttaaaatttcagcttgattatatcacatttagcatgagtgactccattttggtttggtctagtctactggagcctagtgcaggagcttagtctggaacaatggcctcccacaattttgtttaacatttttccccttttggtgagcttctcatctaggagagaatgtgaccaaaacttagtgctttaacactacactctgttaccatcatttagggtttccaatttcattacactattcattatgcatttctttaagtttttgtcattcaaattgaagagagactatttgacattctacgatggctgcatgccaacatttacaaattttgagagaatacagtccactagggagactactattattactatcaggagcataataccaagagtttggagtatactccttagtcagagtccccatgaaccaaaccaactaaaatcaaatagaacaaaatatgagccagatgaagagtctattcatttaaccaagcagcctgttcataaatcccctgcaaccgagtctctataatacctcatatattcatttatgtgcaacaagaagtgttagcaactgcacagattcctccctatttagccagcaggatctaaaacaattctattatcaagtacaagtttatatttatttatttagagacaaagtcatgctatgtttcccaggctggagtgcagtgatgcaatcacagctcactgcagccttgatctcccaggctcaagagatcctcccgcctcagcctcctaagtagctgggacgacacgtgtgcaccaccaaaccctgctttattttattttatttttgatttttagtaaagacaaggcctcactatgttgtccaggctgatcttgaacttctgacctcaagtgatcctcccacctcagcctcccaaagtgctgccattacaggagtgagccaaaatacctggcttatctagtataattttagcaagagaatttaaagaagtctgttgcgcaatcacagcctttgcagtagaatctgctatagagcctatcatgtgggataaatttctttttcttgtgtgtgtatgtgtatgttttattaaagtatgttatacatgcaaaaagtgcataaataatgaaagtgcagttggacaaatttttgcaaggtgaacacaccactgtaatcagtacccagattaggaaagaaaacattaccagggccccagaaacctctgttgttcccctcgcagccactgcctaccctcaaggtaatcactctcttgaccatttttttttttttttttaagtcagagtctcgctctgtcacccaggctggagtgcaatggcatgatctcagctcactgcaacctctgcctcccaggttcaagcaatcctcttgcctcagcctcctatgtagctgggattacaggagcgccaccatgcccagctactttttgtatttttagtagagacagggcttcgccatgttggccaggctggtctcaaactcctgacctcaggtgatccacctgcctcagcctccctaaatgctgggattacaggcatgagccaccacgcctggcccagcttctttttttaaatgagggataaatttctaattattgtcttatttattccaaatcatgtaaaaagagacctaacaaatgatgcccattcagaagagaagtgaagtcctccttaaaatattctctttaatttatggtataaattaagaggagtggaccaagtttctgtttctgactgattatggagcaacaaaaatattattaaaattccaaggcataagattgcccatgtgtaaggttgattgtgaaatcctccacaaataaaaatacacctcatgcatgcatgcaaggccccttttttagttcttttgttaatagaggtaaatgcaaggaaaaaattaagagaggtaagactttgattatggcaaagaagccttgatccatgatctggggaaagctgtccatctagaatgccatctgttttgggggagaaactttcctgattagatttatcttaagatctctatattaggccattcttccattgctataaagaaatacctgaggctgggcacagtgactgtaattccagtactttgagaggctgatgcaggaggatcatttgatcctaggactttgagaccagcctgggcaacatagtgagagcttgtctctacaaaaaatttttagctgcaggtggtggcacatgcctgtggtcccagctactctggatagggaggcagagttgggaagatcacttgagactgagatgtcgaggctgcagtgagctctgatcgtgccactgcactgcagcctggatgacagagcaagatcctgtcttaaaaaaaaaaaaaaaaaaagaaaggaaaggaaaaagaaaagaggactgggtaatttgggtaatttataagaaaagaggtttcattggctcacagttctgaaggctgcacaagaagcataccaccggcctctgcttctggggaggcctcaggaagcttccaatcatggcagaagatgaagtgggagcaggcatctcatgtgaagggaatgggagcaagaggggggcaggaggtgccacacactttcaaacaagcagacctcatgcctcactattgagagaacagcaccaagccatgagagatctgcccctgtgatccaatcacctcccatcacgtcccatctccaacactggagattacatttcaacataagacttgagtggggacatatatcaaaactatattaatttccagtggtatatagttccaagagtctggagtggttcttcagagttgtgagattataaacccaaagtttgaagtcccaaagttttgctgcaatgtgggcggcaaacgcagtctttctctgacatcatttccgtaagacccaatctctgagttctagattgtgaagcgtttgattctcctcagtcagtggatcacaaaggcttcctttacctggtgaaaatacactttggcataatgcattaaagccttgcagcatttagtcacatcagaatttaggagcaaaacatacatagggttctattattaggggcatgggccttcctgtgactatttcataaggggtccaacttacattttccactgggagtcaatctgattgtcagcagtctgcaatacctttgatgaaggcaatccagtcaattcagttagctttgcctaatgctattgtatctgtaaatcttatttaactgtttgacaacttgtacagtgagacaagtacctctaatgctggagatttctctagaaatgtcccataagagaaacacatttcctactaatcttttagctattattacagcattggcttccttgcatgggaaagcttctaaaccagaaaacatgcattggaaatggcaattgaatgaaattcctctataaacatacaaatggttcattaagtacctgaagttttcattattttcccaagataatggttttgacaaaccaaacattggtcataaacaattttagcaatttagaacagtcactacaccaatatatgtgtttttgtttggattactttgtctcttccttgatgaattatggagtgcacagcttttaataatagaagctttgtctgggtgcagtgactcatgcttgtaatcccagcactggaaggccgaggcaggaggtgaattgcttgaagacaggagtttgagaacagcctgggcagcacagtgaaacttcatctctacaaaaaatgtaaaaaattagctgggtgtagtggcatgtgcctgtagttccagctacttgggaggctcaggcaggaggattgcttgagcccaggaatttaaggtggcagtgaggaatgattgcgccactgtactccaacctggacaacagaatgataataataatatcattgtctcaatgataataataataataagggaaactttaagaactcagaaaggatgaggttctccatgagttcatgcttaacactgaatttatatcctgttaaatactaattttgtttctccaggtgtatagcagtgtttattaaacaggttattataggtgatttgacttggactacagggtttattcaaattgcatagcataacaatttcagtagtggctgatttagcttgaaaatctaccaaagtatttccttggtatctaattaattcctgttctgcttgagttggcagctttacaaaccagtcagtctctatattagcagctttacaaactgctcagtctctacattaccagaactctttattagagttctgggaaagctaacacagtccaaaggatacgatcctaaagtcataagaaacctgagttcaagagtgcttgtcagggtcctttccattctttccatgaacttccttaaagacacaacacttttggaatttgcttgcttttaaacagctttcagaaaatgcataagaattaagcaattaactgtggacagacttaaaatggtgatgatttaagacacaactgagaggaaaattcagttatttctgtggcctttgataatttaatataataatcataattatgattcattacatatacgaagatataacagaattttataagtatcacacaattttgagacacatattaataacatattcatgaaaatacaacttgaagaaggttgaacatcatttcttgcttgacaatgcttcctgtatgacttaactccccacattatttaattgaatacacctctttattatctttcttttgaatgcttcaggtggcctttggaacatcccaaaggtagtatgaggtcaaaaagacttaattttggaatttgaaatttgattttgggaaggctgtcaaatatgttaaagttttaaaatacttaatcaaaatagatcacaggtcattataaaataatagttattcattcagtcaaaatgataactaaaaagttttaaaaagcaaaaacatttattttttgctagaaaagaaatccaactttctaaacaatcaaaagacttgaagacagcctgagacagaatctgtctatccttctctcctctattttttctttttttgcagcttcttcaaaaggtgaacaaaaatctgttactatttcttactaatactacatgaaatttttttcaaaagagaaaaccaaattttacttttgtattagtatattattactaaagctaattttaaagaaaccttataaacaaattcatccaatttcagtcagcttttgaacacacaagataagatttctgtaaaccttttataatgtcttccaattttttcatttttcttttcccaactttttaatatttatttagttttatatatatcatttttccttcattttgaaacaacctttaaattaccttagaattagacaaaattacttttcctttaacaacactcacatccttggctcttttgtaataaccttcttcaccaaaaacataccctacgttctttatatactctgtatacagaattgtttgtcttatatctagtagttttaactacacatattaactacaatttaaacttttagtaaccctaacttccagtgaaaaacctagtaagtaattttgaattattttatattagtgtttgttaatgaaaatcatttcataattttttagaaaaatgtgtttcctcatttttagcagatctaaatatatttagcttttctgtaccatataaaaataagataccaaagtatataaacctaaagttatatttaataatgtttcagtattttaacttacttagaaatgactcagacatttaatgtgtctgtattgttttatttaacatgagagtaagattttaaattactgaaaataatttaaaaacaatatcataggtaccttccctaatgtcttccccagtcattctgggtcttgagtatccatgtggcactcaggatggctatgaagggcaggtcccatctgggtcttgaatttatacaccggatgtacaactaaggacagaggatagggctgtgaagaggaatcctggaggatgcaacccctcgcagcatggccaggaggtaaatctgggccagggaggatagggccatactgggcttagctctgtcttgcaactggtggtccaagtgctgaggacgtgtcctcaggcctcaccatggccacttgtccagaccccagaatccagaggctcaaaatcaaagacataagctcacattaaaatgtgtgtaagccttcaggggggcccagcagccagcctttacagctttagcttacagaaaaaataaacaagtatcaaaaatattatagaagcagcagttttacaatcttaaaatacataattgagacagcataaaccttcctaaccaatagacccaagcaaaagtgtctgaattatatttaatactgacaattctgaagatatttctattttattttaccaacaattttaaaagtggttttattaactaaatattagctcacacagaaatatcacatacacgtaacacatatacatacagacacacatacagaaacaaatcttacaggtttcattaagattttttttttgctagcttccaaatagtttttcttttccccattcagactatcagtcttccaattacatgttttattgccctaagcaactgatagctaggcaaacctaaatttgtgcttctaatggatgattcttatgtgaaacaaggtagaaaatttatatctcaaggacatggagttgagacttcaaacctaaatattataccatcatttgcccaaaccagtgaagagtgtaggtaaaggcccagttaagacaagatggccaggtaaagaaccctacacttaagacatattgtgtcagtctaaaccaatggtaaggttttctagtgacttagtcttccctctcttcctggtgcacagaggaagattcccttacaaatagagctttcctttatagatgcaaatttattttataaaagacttttaaaaatagacaactaaatgccagaagagtggattttggacactgatttagttcaataggtggttttttaacttatattctgtttttttttagctaaaattactgacttcagggtatagcccattaaagaatagggaaaagaaagcattctgtatgtatgggctcagcatggatagctctacaaaagaaacaagcctacattatcccagggcctatcacttttggggcaggatagtcactaagtcaaaaggttagcagatttagttgttcttattaattagccacttatttgccttttttgaaaaatcttttagaagagacaataaaaatatttaaatctttctagaagcttctgcatatcaataggcatccctagatgagcctaatttaggagacttcattttaaaattcacttcttaaagcacaatgttgttcatttggaacattccactgtaattctaaattatctttcataagatttcaccattttggtgtttgctatttgggggcatagctggaaggtggaatactcagttcttagaaaatgagattccatttttaccttgaatctttgctttggttctcagatctccttgatcaacttagctattgatttttccctacctgagcacacaagaaaacaaaacaagtggggtagaacacaaaaatgcttgtgaattttcaaaagccagagttcacatgccctgcagtattgccatttactgccacattatttctaacatagtcagacatcagaggcttctaactagatcaaatccagttaattattggattcaatccaatcctggacccagtccagtttccattgtgacttctgaatccagttcagataagaaattggctcaaataaacttagatagctcaaaacacaaattcgtggagctttggaacctgagagagaacttacccatgagttgctggaagctctacatttcaaatctcacttctgatgccatctgttaaaagaaaaacttaagacaaattgaattaaacagagtttgagtaaagaatggcttgtgaatcgggcagcatccagcaccagaatggttcagagtgactttgcttagcctcctttttaaacaggactgtagataggaagacatattacttatatgatgatatagtctgttttttttaaattaacctaatcccatatctcagtccttttttctgttaaattgtcttcaaactttttgtgaacagcataatactccaaattttgagggatctgacaatttattttcatttctctcaacagacacttactctgttttgttctattattggttctttggagttttattagattgatgcaaaagtaattgcaatttttgccattcaaagtaatggccaaaaccacaattacttttgtgccaacctatgctgttaaaaatgatgctgaaaatttatacataaagcttttctatgctttccttaggatatttttaacaaatggagtcatttaagcaaagatcacatgaatttgatatgatttgaacaatcattggtatgaaacattgcaaaaaaactaggcactaacaataatcagatggttagttttataatttatgtaaaagagatgaattttataatttttgcactcaaaaatatttgttatatgccaaacaccattattatgttcatgaatacaaataagaattaaatgtggaattgactcccaggagctctcagaaatggaatttctgcttcatatgagtcaagttactagtctagttacttaaacttatggttatttattataataaatttaaaaattaaaactatattataattgtttaataaataaaatgaagtatttaaaaaagaataggaagaataacaatggaacagaattcagaagccctttcatgataaatgagaaattattatttgttagaagtagcatttcaattcaatgaaggaaagatacattattgaataaatactgttgggctaattatctattcattttgggaaataaaataaaactaggtacttacatataccataaaaaatggactctaggtggaatacatttctagatataaaaacatagaagtacaaaaaaaatacaacaggatatgcgtggggtgggaaatttcctacgcaagattcaaaattccagatacataaaggtaaagattgccagatttgacttcataattttttaaacttctgtaaaatgaatgtgaacttaagatgactgacaagactggaagaaaatatgtataacacataaagcagttgaaaattattactatttctgtaatgttcagatttcagctgcagacaacaaaatccacacaagttggttttggctgagaagaacgtaatacagggaacagtgtgtacaaaatcagtgtgagaattagagagcagaaatttccagcctcaaaaccactctgccccacgtgtgatctggaaagtgctctactgctgctctggcagctaaaaaatgcagaggactctgccactgctgcagaaacccatgctacatttgtctaaatcaggggagttgcatttcttcataaaggaagaaggtgcatcaagaatctgtgtacagattaggaagttgaaactatagcctctactcccaaaaccataccacttccactgctactattctctgtgaaataggtgctccaaaccctgcctctctactttcttctgaatgatgtactctgtacatgcgtttgattggtggctcctagattatgttcagaactcaagtttcagaggaatttggaaaatgtttttttttccttacttttctaactctgtatgttggaagtactttggaatgaaattcaagtgagtaggccgggcatggtggctcacacctgtaatcccagcactttgggaggccaaggagggtggattgcttgaggccaggagttcaagaccagcctggccaacaaggtgaatccccatctctactaaaaatacaaggcacgtgcctgtgttcccagctactcaggaggctgagacaggagaattgcttgtttaacccgggaggcagaagttggcggtgagccaagatcacaccactgtactccagcctgggcaacagagcaagactctgtctcataaaaaataaaaaataaaaagttaagtgagtcaactcacagtatcctgcacaattttaatatgcaaagagtttttatgaaccagtaattatgaaccaattatcaaataataattcatagaaaaagaaattaaaaagtatatactatgaaagaatattcaggctgtgtgtggtgactcatgtctgtaatattagaactttgggaggttgaggcagaaggatgcttaagtccagaaatttgagaccaacctgggcagcatagtgagaccctgtctctacaaaaaaatttgaaaaactagccaggcatggtggtgtgtgcctgttgtcccagctactctggaagtagcaggaccgcttgagtccaggagttggaggccacagtgggcttatggcgccacttcactctggcctgagcaacagagcgggactctgtctgtattaaaagaaaaaagaagaagaaaaaagaatatcatctttactagcaatcaggcaataactgcatagtttttagaagaaaatcagattggctagaataaaaaaaaattaatttcaaaattggcagaaagcagaaagtgtaagcttatacagatttttttctctttttgtggagggcaacttgttattgtgaatcaatacttaaaattatttgacccaacagttctttatctagtaacctgtacatcaaaaataactaacttgcacaaagagatcccaacaaagaatgcattatgtcatggtttgacctaaaaaattagaaataatctaaacatccatcagaaagtcaatattcaaatcgtgcagtcatattatagaattttatacacatttttagagaagtatatttttaagaactggcatggaaaatgcttatgaacattagtaaatgtaaagataagttgcacactatagataaagagatcccagttttggaaaataaaaaatatgtataagtaacatatccatctccattttctctacgacaacctcagtaatatctacattgcttatttatgtgtgtgtgagtgtgtgtgtgtgtaagaaagattctgggggaatatacaacatactgttaacaatgattacttcaggataatggaattggaagggagagattttgatttttcaccacctatatttttatagtgtctgaatattttacaataagttacaacactcttgtaacttaaaaaatgtctgatgtaccaaggaaaatgctgtcaacagctattcaaactgttataatgtcccttaaaatcctcattccaaatgctgtcaacaataattgccaggtttatcatcacagaatatccttggggcttacaaacttgcctaggaaattttttgagattgtgtctgtctaatagttgtcaaaacttcaagttaaattaattaaccttgataccattcctgaggcttgcccacacaatctttgcccattctagcactttgcttccagttggctatagacgttatgtgctaatgaaggctgctgctaaattccaatctaataaaagctgctcaagatcttaccaaaataaacaaaaacatgagttcccaatggagttatgttggttactctttggcctaaaacaacaacaacaacaaagaaaaccatgaactgcaagtgtgctagacatttagaattaataataaaaatagcttatgagtgtgtacttattattgctttatataaactgcctgatttctttgcagtaatgtgaataaaagtcatataatatgactctagggccatttgtgcctttaagttaccaaacctcgacatcagtggaaatgacatggcctattatattatggacaaatgtcctgctttcatcaaagcccatggggtcaaaccaaaactgagaatttattttcaaagaacaatatcccagttttgttttgcacaaaacttctttactctgaagctgattagaagagctgtccaaaccatttagaatttaagatctactgggataattccaagcccatacggataagcctaggagaaaaagccctcaataaattaatttctgaattaagtggaaactcaaaaatatgccacttagagaaagacaattatcaccacaaatgagggagagtttaaaattaaaatgtcgtattcttctcaaatagaaattcattctatgtcctgaaattcttcaatataaataaacatattctttagaaataaatgttcactgaaattcttatttttcctcctttgcaaacaacagtcatctcaagcaaagaaaacttgctctgtcttgttttcatgccttcatttcttaactccgttgcccttattttatctttttggtattttgagggaaatctcaaggtaaaaacaagttgtaaagttgtaattcccgaagtctcaagttttgcctcttgaaatcctgatttagaagcaagtttcccacgcaatcgtgcaaattgaagtaattacctgggagtactcagtatcttggagaccattctagaggattgtttcaggcagaagaggctgagcaaggaagaatgctgtttgtgatgcatttgtttccatcaggagtaataaccaccccaatcacatatgtaccattccagcctcattggtttcctcccttttgccggaataaggtatttaatttctgctcactttctccccttctctccttttccccattaacctaattcccactcttcatttagagcccatctaaatctgaccaatacttttaagttttctcaagcttttctggtctggaaatcccttcttgccttatcaattaaaatctgcaggcttcaagaggtgcttagctcaattatgcccatatcatcaatgattttgtaacaactgtattttctctccaaaagtatattgaaaacccttaaccccattaggttaaggtcctaatgctacacatttttctagttttaaaaattaaggtataattcttccctttttgtatattaattccacaagttctaacaaatgacatattccattgtatgtgtgtaccatagttttttttattgactcccaagctgaaggacttttgagttatttacaacttggatgactatgaatataataacttaaaaacatgtacgtaaagagttttgtgtgaatacacgttttcatttcattgcggtaaatacataggagtaggattgtcaagtcctgtagcacacatataacttctactgtatttcctaatgtacctgcaaactgtttcacgtaactgagacagttgggcttccttcctttagtgatctgagtaaaatggttcagaccactaccagcatataacctcaggaagtttaaagttatcccctaggccgggcgcggtggctcacgcctgtaatcccagcactttgggaagccgaggcgggcggatcacgaggtcaggagatcgagaccatcccagctaaaacggtgaaaccccgtctctactaaaaatacaaaaaattagccgggcgtagtggcgcgcgcctgtagtcccagctacttgggaggctgaggcaggagaatggcgtgaacccgggaggcggagcttgcagtgagccgagatcccgccactgcactccagcctgggcgacagagcgagactccgtctcaaaaaaaaaaaaaaaaaaaaaaaaaaaagttatcccctaatgcaaacttgcattcagcaattttcattttaaagggcatcattgcatctgattaccaggacctttcatgatgtcttcccccaccacctcacaacttcaccaataataacctggatacgaaatttgcaagaccttccaattactcatacagtgtccagtcacacaggaaacatgagtaagcatcataaattttactgaaagtttatcagggcataagttgtgtaggttgagtgttacattttacacccctcaaaaaacaactaaaaaattacgtcttaaacatccctgttctttcaaggaatcccaacttggacactcaccattccggattctttctgttcatccccttttaggagctactcttgtcaacttctctccaactctgaagttactttatttcctctatatgtagggcaactcagctctctctgttattcccaatggttcttatgtacattcgtataaagtcctcagcaaaacaaatgcaaaacaggaaagttaaggttattttccctaattagagtgcatcatgacagtttcttattaagttctagttctttgaaagtcgaatattcatttatggtacaagttgataactatcagttagctagtactgtgtaataaaccattctcaaatttaatggctcaaagaaacaaacatttctttttgctcatggggtttcttaaggtcagttgggaagttctggtctcagctggtttcattcatgtctctacagtcaacagttgttggttaggtagctctgttgatggaggctgggcttcctcaatacttggctgtaagatgttttaacagggccttggataagactactgagctctcaactatgttgtctcccattttccaaccaaatagtcccttatttacaacgcaatggtgggagtccaaaagaaagtgtggaagtgtgcatgcacccctcagaactagcataccatcgcttccaaaccattacattagctaagcaactcacaagaccagcccagattccagagtaaggaaatagactccacttgtcaatgggggttgctacagagtcacattatgtagaggatgcatatatgaaagataaagagttagagacatttaaaaaaacaatctaccacacatacataagtagaatattctattatttagaagatctaatttccctataattctaaataagtaaaagtttcattttatttagctcatgaacacaaatctaattaaacttcacactttatttaaaaatgtattttcccggctgggcacggtggctcacgcctgtaatcccagaactttgggaggccgaggcgggcagatcactaggtcaggaggtcgagaccatcctggctaacacggtgaaaccccgtctctactaaaaacacaaaaaattagccaggcgtggtggtgggctcctgtagtcccagctactcagaaggctgaggcaggagaatgatgcgaacccgggaggcggagcttgcagtgagccgagatcgatccactgcactccagcctgggcaacagagcaagactccgtctcaaaaaaaaaaaaaaaaaaaatgtattttccccaatgaaaagttaaaatcacatgactggtttcgttttaatttaatcaactacccataacctacaacttagacagtacctctgtggttttctgttggttattttagtcagtaccattgaatttatttaaataaagaatatttaaaggattgtgtagaaaaagtttttaaagatatcgttaaataaaaaggaagctgagttacaacttagaacttccctaatatgttttccttttgggaaggaaagtgtttttatgaagttatacacgcatatagttaaaagattacaatagttcttcaaatatttgttatgaaaaacatgagtcccctacatccctgcagccacccccaatgccttctttcaacagacaagcattcccaaccttttacaactattcttttggtttagacatccttatggcttgtaattgcacatttatacttatccctttgtattttcagtcttgggcattacctactgtcttcctgatacgaaaaatagtgactcctacatgatctctctctctcgcatcttccagctcccccgtgtcctccccaccctgaaatataccttttgcctctcctcatcctcttaggatagttacattccaacttgggttagaataatatgcaattattacaatgattaataatgctatctacaactgatccacatgatatactgtatttttttcatttcttgcaaactttttatctgcaattaattgtccatctagtttattttcttaattccccatgtatttattttttaataattcaaccccaaatgctctgccagttacttatctcactgactgctcctctttaaatgttcagatatatcattatccaataattttattttctcaaatacatttctcccaaacctttctggcaagctttcatcagaagagttgccgtgagtctggtgaatcaatgtccttctgataattgtctttctctcttccctatattggattctctatttcttaagccctgtcttattcttttgtggtttgtttattcattttggtgtgcacatcctctggtagcttccaaagaaagattttggaggccttgtattgtctggaaatattctaaacttacattaagttacatgttgtgaaggtataaaattctaggtcaaaaagacatttcctttggaattgtaaaccatgtttccattgtctatagcttccagtgatatctatagcttctagttctggtcatgaggggtctaagaccattctcaatttttattctttaattacaactttaaaaaatatctttgaagcttgcagtaactcctcttcatcctatgtctttgatatttccccattgtcttggcataggaatattttcaattattgctgaaaataaatgaaaaattattcattttcctaggatttttcaatcaggaaacttatccacctccattttgggaaatttctcaaatcattgtttcttcctatacctgatatttccctaatacctgatatttctttgcaatattctctcttttctttctttctttctttcttttttcttttctttctttctctctctctttctttctttccttctttccctcacttccttccttccctcccttccttccttccctttccttccctttctttccttcctttctctctctctctttctttttttctttcttctctttctctctttcttttcttttctttttgctttcagatcttgtgggagtatttcttttttttcctctcctatttccatttctatctttacattctttcatttgtggaaacattttcaactttattttctgatacttccatggagtttttaagtttgttctcacattttaatttctaacatttaaaaaaaatgatttgaagttttcttttaatatcttcttctattgttcataaatacaatattttcttttatgatttgagcatattaatgtaggtgttttaaaatttcttctcattgcataatatgttttctccaaatagatttttttttttggtctatttattttggtcttaatcttttatgataaagaatttcctaagtgtctagtgatcctcaacaatctgcttatgtttaaacctagggccctgaaagctcattagatgctctgaaccagtggatgggctttgttaactctgggctttaccatggaggtgtctaagggaggtttctgagataatctttaaagtcagagttcttagctctttctccttgggctgctcaaattccccagagaaaaacttttaattttgtacctggatgatataggccttgctgccagcactctgggaaataaatgggaaaagaaggctggagatctcagagttaagtatgcaaatacaggaccaccactaagctggaaggataaccaaacatcatggtttgccctggactgaggagtctgctgggatgtgagacttttagtgctaaaaccagtatggttccaggcaaaccaagacagtcactttagcctggacaacattcttaaaaggacctttctctggcccttctttgttgataccttttcccatagccaagggcaccatcccccgtttgtagactgtgtttcagaattctgccaagtggcctcaagcttgcttccagggactatgtgggcctgttccctcagtctgtccctctgaggatgaacaattttaccaaccagtgtatgcacccctgaaaccaagagatatacaagagtgtccatttgcaggagtctgatagagcttgcacaggagggctgggtgtccacaggtgctcattcaaggccctgacagtcaagaaagaaatcagggtgtgaaggcaaggaagggaggccagggccacagctcccatgaatactcttgctttgggctctgaaaacgtcagatgcaggcctggaccttcctgttttcactgtacctccaaccctccagcccagagacttttcagttaccctctcccactactaaacttccggtattttaccagaatgaagaaagatgattgcctggccacaaagaatggactgtaggatcttgcaattgaactcaagagacttccaatcaatcccctgttatggcgccaccttcttccccacttccagggatacccagtactgccaacttctgagcctgctggaggtcagtggctgctaattggactgcttctcctcagtccccacttgaggcttatcacttgaccttctttggtttgctaagtcaggttcttctgattcacccattttctagcttccaatattttatgttgtagctgcctctcctgtcccttgtactagtaggtcttactcctttttttttttaaattggtttactcatcattctcagcaaactaacacaagaacagaaaaccaaacaccacatgttctcactcataagtgggaattgaacaatcagaacacatggacacagggaggggaacatcacacatggggacctgtcgggggttgggggctaggggaggaagcacattaggagaaatacctaatgtaggtgatgggttgatgggtgcagcaaaccaccatggcacatgtataactacgtaacaaacctccacgttctgcacatgtaccccagaacttaaagtataataaaaaacaattggtttactgttacatgaataaggtttacagagggacagaaaatgattgttttcaatcacatatctctattaggaagttgaaatgtcaaaatatttccagcaaaagagtaaataggaggaaaaataaataaatttgggcaaagatatgggtgagaaaatgggaaacagtgaatccttgtttgacccactaacgaaacaatatcccaaaattacatgagataacatctaccagtttgtttgtcaccaaattcattatatcaagcaaacatgcatctgctctggaatgggcggagaaagcaaagggaattgaatttcttcccaagatattatttccagcctctcctagtgataagctgtggtgattgtgctactttacatatggttggaggataagagcaactacaagctcttaaataacacatacatctaaaacaatttttttaattaagtgtttgagtatggcattgaaaaaatggaccatagccttactttagcctaagttcctgggtagtgaagacagttggcagcatattcagggctagaatcctcatgagtgtggtgggacaggggatcatccatgcaccccctacagccatcaccttgcaacataaaggcaggccctggccaaagggagtagcaggtattgccatcaaggccaagccaagcctgcattggctcagagaaaaggaactgacttgacaatatgcctagtgtggattcatgtaatgcattatttcactgaaaacttctagatctcatcttacatgcaaagaatgaaatgcccaaaggggttaagtaatttactcatggcgcacggtagctactcagtggtggaactcggtatcccatccaattctgtctagttctttgaaactttccatataaaaatcatcatgaatctggacaggggcaggggcttttactatggttttccaggtagcaagatgaggggtctttggacatggcttttctctatctaggtacagtgcactgggcctgcctatggcaacatggtctagatagcagagtgtgtctctggcagatgggttctctttactaggcagtgcactcggcttccctcacatgcggggtccagctgacttctggatttcaaatcttctccctatggataatcagacaatcactatcttataattttaggggcaatatactcaaattattaaatgtactgacatttccttgttcttggcgctctacattttgtgttgttgttgttgtaattatagaatgagtgtgtctgtttcatattagggttctcaaccaattgagatcagatgtatggtaaaagtaagggatcttttccttcctgggtctagaatttatttatttatttttgtcactttgaactactttgaatctattcttcttccacaaagctcactgggttaggcttttaaggaaaaagctcatagaagtcatcttaagtactgtaagacttcatgaagtatttgaaataaaatgcccatggacatatgaactgccatctcagccattcatccaggccttatgaagagtacaagaattgagaatggcctcaggtcttctgtaacacagctcaggggctacaaggtcaggcaaggctccagaaaagaggacaactgtgcagccacagaccttggcaacacaggctggtgggtgcactggcccagccagtaaagggcacaaagcctaatagcatctcctcccaggcccttcggtgcagataacagcctgatgcagctcctctctgtctctgcttctttctgatggtctttctcatctgcttccacttccaaataatttacttcacttttagtggcatttaaacagaaaattgtttctttacttacaatacttctgacaccaaatgtgtgtgtgtgtgtgtgtgtgtgtgtgtgtgtgttttctcaccaacaaccaattctccaactctctgcagacaccaacagggagtactacaatttaattcaattctgacattaactacccagagttagtgtggaccccacaaatcaagcactcggtcccacaagactgcccccaacttcaggtgccaatcacaaataaagggtccccaggttgtccttgcttctgtctgacatagctactaacagaggatatttattgtaatggctaatagaactcagggaaatacttgacttactgttttttataacggttattataaatgatacaaaagaacaaccagatggggaggggcacagagcgaggtcaagcacaggagtttctgtcccggtgaagctggagtccaccatcctccctcccagcatgggggtgcatcatcaacctggaaatcctttgaacacttttgtttagggttataatggaggcccctttacatagacatgattgagtaaatcattggcactatggagattaactcagtctccagcccctctcctttccttggaggtcaggagtgaggctgaaatttccaaccctctaatcacatagtttgttcctggggtgatcggccctcaacctttcagagtcacctcattagaatgaaagttgcttctgtctcccagaattaaaaggattttaggaattctgtgtcaggaactggggacagagactacatatatatctcttattatgtcacagtaattattttatttttaattttataaagtaaaaattattaaatatgatttttaaaatagtaaaaatgcccatatagttattatccagaattagcaactgttaatatttgattatatttgctttcagaaataaatataacgttagaaatgtgttccctttcagtcagaaatcccctgggttttttctaactccttctgcaaagggaacaatggtcaatggtggatttctttccactccatgttttataccataaacaataagtataatagaatataaaatatatgtgtttattatttacataaatagtatcaaagtatatcttgcctcttcttacttaaagttatattttggaggtctagcaatttgattttcatatatttatgcatgtatgtacatacacataacagtcatttcttttggtttctgtatagtatttcaccatatagataagttacatttcatttatttcctcattaatggacacttagattgatttaatctttctgtaatgtacagttgttgcaataaacactctcctaacatctgcttatgcatatatgcaatcatgtatctactgtgaattctcagaagtggaattgttaagtcaaatgctaagcgcattttcaattttattctgccaaattgctctctaaaatgggtgtctcatttgacattctcagggcaatgcttagaagtttcattgttttcaatactttgccaagacttggtttcagcagattaaaaaaaaatttccccatcaaatggatgaatttagcatttctttttctttctttttttttaattcttgcatttttctgaaaactaatcaggttgagtttcttttaggttgttgattggccacttgagttttattttctgcttttttcttaagttttaggatgtttgctcatttgcacattcaaccaatatgtataggttacttactgtggccaggccctcttctgtgcattatgagttcaggtggtgaacaagacagacaaacaccatggctcccttagggtttgtattctggagaaactgggataggcaagaaataatctaataaaagaacaaagaaatttctttgttcatccatgaacaaagcatccatgagaatttgagacaatgaagaaaattaacacgtgatgtgacagtaacagagaaggggcagtgaattccagtgggtgatccatcagggagtggctttctgaggaggatacatttaagtggagatttgaataacaagaaggagccagatacctacaaactgtgggtggagatgccagcagaggaagcagcaagtgcaaagaccctgagaacacaaatgtgatgtgttctaagggtagaatgaaggcttcggtagttgcatcccaggaagaaaaaggcagggaggtaaggggttaagagcccatacgatgcagggacttttatttcatgccaagacgctgatgttaatctaagagcaatgtaaggctttggaggaagcaggggtgcatgatgtagtctgatttactttttagaaatgccccgctagctgctgggtataaaatgaattggaaggaagaattaaagagaatagtcaagagaccactgaaacgttccaggatagagatgacggaggcttggacaaagttgttagcagaggagatgaggagaaatgggcagatttaggatataccttggagaaagaggttacagtactttgcgatagattgattggagaatagaagtggagagaaccggaataatcaaaaatagttcctttgagtttgaacaagtgagtgagtggtagaaccatttaccaagatagccaagaccagaggaagtgtgagtggaaatagagatgagtgcaaaacctcttggatgtctgaatgtcctggcactaatattagtatcagggcttagcaactgtgtaagtcaagatcctgctggtaaatgggacctgaggccaggcgcggtggcccacgcctgtaatcgctgcactttgggaggccgaggcgggtggatcacttgaggtcaggagttcgagaccagccaggccaacatggttaaatcccatctctactgaaaatacaaaaattagccaggcatggttgcctacgcctgtagtcccacttactcgggaggctgaggcaggaaaattgcttgaacctgggaggcagaggttgcagtgagccgagattgtaccacttcactgcagcctggggaacagacgaagactccatctcaaaaacaaaataaaacaaaaaaaaaagagaataggacccagtgaagattgttcaagagacttcaatgaggagatttcttaggaggtatgggtagggttaagggaaaccacaggatggttatggtatcccgggacttgccatggtaggaggctattaccaccacagacctgaaggggaaagggaaggaagcagaggtaatggagcttaataagagtagggatctcaaggcaaccactgctacaaaaacaggaaaggcagagagggagtcaagggaataaatgccctgacttccctctctcctctcaccaacctctcttgctgctggctcccaaatccaaccagagaccagagggcaagagagtctagaccaggaagtacatagacaccattaccgctatcccctcccaagacctaaaacagggcagaaaagggcaaaaaatgggtctcgttggtgggaggaaggtgagcaaatagaacataactggcaaagcaacctatagaatgtttgctgtggcacatgggcaagtcaccccaaggtcctttttcatgctggttttgaggacacaacagttagcaaaataatcttttctcttcccactcatgttgatgagactcagtgggacttacttatactctcacatttcagtagacagtaataatgatttcattcaaaatgtggagtctgtatgatccctcttcatgcctgacttcctgcctggatccagtatgatcagatctttgactgtcctaagcactttccatggctctgtaccatttaatgaataaaaacctctttttttttttgccttgcattcaaggtcatccttcctattttggctttagccatcattcctcaatatttctcctgctctctccctgcaaaaatcctagattgtggtcttgtactttccaattttttgcctttactcttgcccatttctgcctttttttttaattttagggacaaatgaaatgcctgaaatactctggtgagcctcctatactcaagttaactggaaacaaacctgccttgccactgttctcttctgtgtggcatagaatcggtcgctcataaatcaaagtcatgagggttgaggaaagggttaaaactaacacaccttgagggtttttggcacacgtgtcatctcatttactcccagcaacaatccaatggaatcaggataactaccatgatgagaaaacctgggcttagacagacatggtgtttattgcacatgaattacatatccagtcacactcgggtgttctgatctctcacttttccaatgaggaactgaaagtctgagaagttaaataatctgctcaagatctctcagctaacaagggataaaaagacagaggccggattcaagctcagatctgtgtcctcaggcactacaccatcatcttccttcgcaacagaagggaaaaataaaattactggttgccctctacaggcgaagcatagcgttgagggttttcacgtaacattgtctcatttaatcttaactgtaaccctggaaaggaaagaatgtccaacaaggaggcaaaagtgagcacacagacgggattcaaactctatcaaagagtggctggtagcttctgctgaagtcctttctcctctccagccttcaattaactccatctgttgattacatcactttatgaaagatgaagttggaggcttataaagaaaagtttgtcctgataggcacagtagtggtagctcctgggagagaaagaaaagcctgtatattctggctggtagaaaaacaaaaaatacagacttctcccttgaagccactgtcttaccagttaattctcactggatctttatttaccacgtaatcctttgtcacagttatgaaattaaaataggaattcatatgctttcttttcctgatatctaccttaaaatacttagccaagtgtttgttgcaggaaaacaaatatctggattatctcatcccctcacctaatctgattcatgcaaaagcaccatacacatatgcacatacacacacatgcacacacacacacgcacacctgcacacacctgcagcgtcatacccagatcggtgctgacttgcatctttattcccactaatcttttaattgcaatacctaaatcttccttctactcacgctttaactctacggtggccaagcaaatattctgaaatatacctttattttctaaatagatgatcagattatataatcttataaacaacattaaactcctcatcgctgtttccttgctagagctccgctaaaacaggagataggatattataattgaatacaagtttgcaatagataattagtaagtggatttctagcaggaaacagcactctattcagatgatttagtgaaagacatcaaatgaagagcctattaacagaggcacaggcagcattaaaggaaccaaaaagaggaaagatgaggcatccatggctatcatccatagatctgaaaggatgcagggcagtgatgatgttaccagagccaagtgagagctggagccatggaagatgagctgtcagatggatgctataattatgcaaggactcagccatttctagaactggaaagtcaaagccgacagggagtggggaagaaatgactctgagctcttttcttaccatgggatctccagcagggcctcccattggtcaaattcagaagaaagccaaggtgcaagggatgcaggtattgccatttagagtgatcagcctcctggggcacagagcggagcagagaaggctgagaatggatatggaaggaggacaaaagaaaatggccaatgcatctgccttctttattccctacatatctagcatcaatagtggccccacggtagcaaaaccctagattccagtgtcttcattcatttattcaacatgattcgttggttgcattattaaattttgggaaacaaaaaaacaagctttactcataaggaacagatcattgagatatgtgagaaagcatacctggtaaaatatatcttggaagcatttctttgaccctcttgtattttgctagaagccctctatcatgaaattaatgtttataaatatgtcagtaatatattctagtaatctgtatctgaactttactgtggatcacacttcaatcaataaggaaaacctatatttctggaatgttttagagagttcaatgttaaacacattgatcttgaaatccttccattagaaaagaaggttgcagattcttgagggcattttttcaggagagtaatagttctttgttatcctatattctttaagccttaccattatcgggctagaacaccagaaacaagctctcccaggccacttgagcttagctctccacagaaagccttcattaggctatggtttaatactttgggtttaattgaaggtcagtgtgaaaaatggccatgtgaggcaattttctgcttatgttacaaaattacttttatagatgacattgattatgttctatgatgctctttatataagcagccatgtcaattcctcttagaagagtttctctggaaatatgatctctgctttttttccctacttaccataattgctaaagcaatgatattaaactgagtttgtagaacattgttaccattaaagcgatcttccatttcaaaaaatatttacctataaagaccaattttgtatctttgaaaaagtcaccacaaattctttttaaaagtatgtagaatataaattaagaactagagttaagaatattacatattattagttaattaaacctaacagcaatggaataattaaataaccatacaagaccaaaaatgtaggtatatgtatgtattaagatgtatacctacacaaacatgtatgtatttgtgcatttgtatatatatatgtgtgtgattatatgtatgtatacacacatactgtacagtatatcacaatgggaaaaagatgaagtgagtgatacagataatagataaaataagccataggagaaaaaccacaatgtgtcagagaaggcagctatggtttcattcattaatttattaatttcacaaacatttattaaactgcttctatggtctagatgattcaaagtggtattaggcaatacttctgtcatcaaggagtttttggtctagtggggcaggatggggtgagcaggcatgtaaatttattataggaatgtgtgtcaaagtcaaaataaaatacagagacaaatctctaaattgaatgttttatttgggaatcacagaattgcaatttggagtatacacacagactgggtcgtcttcagtaggcctgaagattggggcttttattagaaagggaaatgttgtacactgttttgaaggaaagctcattggcactaggaagcttttgggagctggcaagttctgaatagtaagtgatggtggaaggtgaaactagactagttagactcaaggcaggtcatttcaatagctatgagataaaactggtcttagggctacagcaggctgtttcagcagctgggcctgtggaaaataaaacttttggatcaggtgctatgtgtcccatgtgctttttattcctggcccctcaactctgatttagctgggtatgacaagaatggcaaaatttgtataatcaacttccacatgtgttataagaggaacattctagatgctgctgagagtccagagctggtggaatttggaaaggcagaacaccatgccatataagaagcaccatcaaaccatggtggagaccaggagaattaggagtagatttgaaggacagcctgcataccagtctatctggaataaagtgttactagaaagccctaaataggtatttgactccaataagaactccatacacagtgctaattttatcttttttcaaactattttttctttgtcattttcctgtcaactctcatatgattattgcaagataattcctagtacaagcactgtggtagattacttgccaaaagacgccaatttttcaccccttcctgtatccacattatgtgcgcatgcagcctgcaatgatctgtgtccccacaaaactaatatgttgaaattctaacccctaaggtggtggtattaggaggggaggcctttgagggtaactagggtatgagggcagagtcctcagggatgggattagtggccttctaaaaatgggcctagagatctcagtcaccctgcaaccacctgaggggttcttcctgtccactgcataaagaaagaccaggcattgtcatacagaaagagtttaatagacatgaggctggcaacaccacatgggagatggagtacgtattcaaatcatcttgttcaaagctcgtaggttaggggtttttcaaaggcattttggtggaaggggtggaggtggccaggtaacaggtgctgctgattggctgggaaggagatgaaatcacaggaggttgaaactgtcctcctgatggctgaatggctaccaggtagggccataggagctgggttggcagtccaggtggagccacagatgtcagacatgcaaaaaaagtggaaagatatctcaaaaggccaatctataacagcggtgatattcacaggagtagttgcagaagatgcatatcttataacatcagcaaaatggctgacaattgtttatgtctgcaccttagcaggactcaggctccactccttcctccagcttgatgacttcctattagctttataaaagcaaggtctattatcatttacactacagcctaagtgccttccaaatttagcttggcccaatagcccagaaataattaagggaaggcaagactggggttgggttatctcagcttacagttataattttctcactgatataacttttgcaaagatggtttcaaccccttttatcataggaggacacagtgagaagacaacctctatgaaccagaaggtgaaccttcagctgacactgaatctgttgataccttgatctcggacttctcagtctctagacctgtgagaaataaatttctgttgtttataagccacctagactatggtattttgctgtaacacccacacagactaagatgcagcacctcccatcaggaagaggtggagtctatttctctaccctttgaatttggtcccggccatgtgactagtttgaaccaacatagtataaggaagggatggtgtgccaggtctgagcccaggcctccagagaacttgcatattttttctctcttttgaaaccctgcctttgccatgagaacaagtctaggctagcttgctggaagatgagaggccatgagaagcagcaataaagtcatcccagccaagatcctggatatgtcaaagagcacagcaacaatcaataaagctacctgtccaaccagcagctgaccaaaatgagggagtgagacccaccagacctagctcagatcggcagaaccacacagttgacctgaaaactccagagaaagaataaatggttgatgttttgtgttgctaaacataaaggtgttctattatgcagcaatagctaactgaaggatttaggaaaaataatcaagttattatgggaacacaatggaaagtgagaataaaatggtctgtcataaagtcaaaaagccctctattcccagttctattgttaactgaccgatgcccttcagcaatttacgtaagcttttggattttggttttcataactgtggtttagataagataggggtatttttgattaaggatggaaaggtaaaaacatttttatttcaattccctcttgaaacataacaaaaaagagtaataaacagagggggaaaatcttcaaaagagaagagtatgcaagagagctaaaaacatgtccatgcaaaaatatgtacacaaatgttcatggtgacatcactatttataatagccaaaaagtggaaacaactcaaatgtccatcaaaaaatgaatagatgaataaaatgtgacatattcacacaatggaggagtatttggtaataaaaatgaagtactgatatatgctacaatgtggatgatccttgaaaacattctgctaagtgaaaaaagccagacacacacaaacacacacacacacgcacatgcacacaaacatatattgtatgattccagttaaacaaaatgtccagaataagcaaacacacagagacagtaaattaatggttgccagggacgagggggaggaggaaatggaaagtaattgccaaaaggtataaagtttctttttggggtgataaaaatgttctggaggccgggcgcggtggctcacgcctgtaatcccagcactttgggaggccgaggcgggcggatcacgaggtcaggagatcgagaccatcccggctaaaacggtgaaaccccgtctctactaaaaatacaaaaaaattagccgggcgtggtggcgggcgcctgtagtcccagctactcgggaggctgaggcaggagaatggcgtgaacccgggaggcggagcttgcagtgagccgagatcccgccactgcactccagcctgggcgacagagcgagactccgtctcaaaaaaaaaaaaaaaaaaaaaatgttctggaattggatagtgctgatggctgcacaacattgtaaatattttttaaaacactgctgaattgtacattttaaaagggtgaattttatattatgtaaattgtctcaatttttaaaactgtataaaaaaagaaagaaaaaggggctacaacctcaaatcattgaaacacagttgccccaaactgaaatctgcacaaaaacggccatgcattaccagtcttaaagcgagatgcaagaactctggttgcaatgctgaaaaaaagaggcagtgactgtcaatttcaaatgacagcttgcaattaaaaaatttagttgtgaaccataccaatttcttgaaggctgtaagtagagatatacgtgagaggcccaagggaaaatcatatgtattaaaaggatgccagaaacaacagattttattagagccagactgtcacagaacattcctgatttattcccctacaagttatgtagcatatatctgtactcattcaaaatgcatattcattaggtaccagtttgagacttgttgatagacaccactaaataaaaataagggaaggatataatgtaagtaaaaggtagatgaagaaaatgtggtgtataacaagaggagtcctagagaaacttataggtccccatattttcaaagaaattacatgcaccatgatgactccaaaagaaagaaagaaaaaggaacaaacatcaccccttttggggggggtcatcaaacaccccccaaacataagataagagttcaaacaacaactttgtaagacaaagtagatgaaaaatcatcttgcagagcctaaggaaaaaaacagaatgaaaatataaaagcattcctgagataaagggcccactagtaataacaggtattgaaacatcactgtggaaagtgtaatcaaaatcatgatggacaggcttgaaaaaaatcacacaaaacaaaatggaaaagagcaatgaaaacaattataaaggaattgacagagaagacatacaaagggaactatagggagctatgttttggtggactctgttggtttcctattgctgctgtgataaattattacaaacttaacagtttaaaacaatacaagttaattatcttgtagttctggatgttggacacccaaaatggctttcactgggctaaaatcaaggaggcagcagggcttcttctggaggctccaggggcgaataatttccttgccttttctggcctctaggggctacctgtattgtttgcctcgggccccttcatcttcaaagccagcagtgtagcatcttcaaatttctccttaaccctgctctcatcctcatgtccccttctggtgtttgtttgtttgtttgtttgtttgtttttgtaaggacactgtgattacacatcctagattaatctaagacaatctcactatttcaaaatccttaattgtatctactaagtcgcttttccatgtaaggttacatatgcagaagttttagggattaagatgtggctatctttggggagagggggcatcagtctgcctctaatgggcactgatatggtttagctatgtcccaacccaaatctcaccttgaattgtaaaaatccccacatgtcaagtgtggggcaggtgaagataattgaatcacaggggcaggtcccccatactgttctcacggtagtgcgtaagttttacaagatctgatgattttacaaatggagttcccctgcacaagctctgttgctgccaccatgtaagatgtgccttttcttctcctttgccttcctctgtgattgtgagtcctccccagccatgtggaactgtgagtccattaaacctcattcctttataaattatccagtctcaggcatgtctttattagcagcatgaaaatgaaataatacagacaccaacatatatcctgctgaaattacagaggtttgaggataaaaaatcatatgggaatcatagacagaaaaagtaagtgacatacatggggaaaaagttagcttctgtctccctccagaaataataagtaccagaagattagagtaatatttataaactactgagaagaaaaaactgtgacccaagaattttataccccctaaatttcccttcaaacgtaaaaataaaacaaacctttcaagtatacaacctgtcatgcctaagaattcattttggaaaaaaagaaattcctgaggatcaagtccagtcaatttggagttgaaaaaaaatgaagaactcaggaaaagaaatgttgaataaaatgagagtaaatctcaaatgcatttaaacatgaaactaagatgaaatctctatggacattatgattgcaaatagattataaatataaaatttaaaaatgtaatctcctaaactctggagataaaggcctgttttctacactaatttgctcagttttgaaaacaaagaatcaatagatactgaaaaagttggaaaaacatggctcattattgaggaaagttctaaagatgtccaagccaactctctcaagtgttgatgacaaattcttattctttttaattccacagaatctcctatctattaaaaaactgcttcctaagtcagaaggggcttggcaagaatacaaataaacaacaaccaagtaaccactatcccatgtatcaatagccatctgtggattacaaaatgctttgatgcccatgattgaagtttggaccttgtgacacctcagtaattgtgcctgacatcttccatttgccccttaagataaagatcctctctcttcctttctcatcctgctctcctccccggaagtcagacctatgctggctacatttgtggaactgctgtgtcctctgactttgtttgtttgctctgggccaatagggagccccaaaaaattggagggagggaagatacagattatcctgggctagctctgtccctctgctaaaagtcaccattccttgcaaggcagcaaactctacaggagtctctccttctgtgttctgggaaccactcgtttccttcatcattgtggctgcaaccaactttaccctctattgtggttcccctatacccaaacttttgtaaacagcccctttgttaaacttcttggaattatcctattgtgagaattccctttggtttatgttgggacactgattaatacagtttcttacatccattttaaattgagctagccaaggctgaagtaagttatgtgattctagacacaagggtcattcttctatgttgtctttcttcctagcctaggattaaatttggttcagagctatctacaaaataaatggttgaggcacctgctcatgatcctctggcaggaaaaaattctaattaatctctggggtgaggggttataactctaactagtctggttaaattagaaataagcttgcaatgaattatatgtctagcttcaaagttttattttaaacgtaattgactgataatacacagctgactcttgaacagcatggatttgaactgtgcaggcccacttatatacaagttttcaatgaaagttacactgagtgtgcctgcctctcctgtttcccctttcatctccttcatctcttcctcctctgccacccctgagagagcaagacctatttctcatcttcctcctcctcttcagcctattcaatgtgaagatgatgagactgaagacctttataatgacccagtaccacctgatggaaagtaaatatattttatcttctgtaggattttcttaataacattttcctttctctagcttactttattataaggctacagtagataatacacataacatacaaaatatgtgttaatcaacagtttatgttattagtaaggcttctaatcaacagtaggctattactagttaagttttgagggagtctaaagttatacacagattttagactgtacagggggtcagtccccctaacccctgctttgtccacgtgttagctaagaataaaaagcagttgtgtctcccatcagtcctttccttgtcttttgcttttaatgccttcgtgtagctcatcagcaacagcctgggttctttccactcgcactcttgtctgaagtctaccttcagttcctaggcattccatatgcccatcacccagttgctgtgaaggttagatgccaaatggcttccagccactctttccccagaggactactttcagtgcagaaggggtgtcttgccaggaaagttttgtcttccctctgtgtaaccatggacaaacagccagtgactgagtgatatagggacataaatctgtgatacggcttatgttttagagctctccctatgggatctgcctgaggctagaccttacctaagaccacatccttgcaatcctttctcatcccttttaatccccttgagggtttaccctgaagagtgctttctcggtacatcacacacacagagggatccctgtcctaggctctgctttgagcctgcacttcctgtgctgtgatttgatagtctctgtactaattccatcttcccttcccttgtttttcaaacatttcacatcccttattgtgtgtgagtcattgcttttatgtggcccaacatcaggaagctgtaggtaagactattagtgctcactttaattatttctttagaagtcattctgggtctgaagatcattacacccaacttcaaagcaatcttgactcatatttcatccagtctatttcacaattctgcaaaagtaggaataaaatagaatttccatgctttctccaataaggatctttaaataaataacatattcataaagttctcccaagattctattgtacacaaataccaagtacaacttgtagttgtacttaaaaaagagtagttgcgtttaaaaaaagaagttgacatcaactcataactctagcatgtctattcctgaaagcagaaacaatacttgaggctaaggaaataaaacagaattaggttagttagttagcttgtgttattaaagttaactttagatccctcctaagatgaatcacttattcaccctctactgacacaatttgttattttgaagaagagagagtttaggagctaagaaatggtttattttaaaatatctttttaatagtggtgagcttttgagctaaccataaaactgctgtacaataaagatgctcattaagataacaaaggtagggcgattaaagtgaaactgtgagctgcatcctctgtatctgtatatgagtcgttaggaaaatcctcgtgacagcaaaccaacagaataggcaataggtggtgctgttgctatgtgtaatgcctagcaaaagacaagatgacgcataaggggaaaatatttgccagaaagagcacaagacaaaaacatacccctaacttctgaattctccaaaagatggcagtgtcatttctttgtctctcttgtctgagctccaccacttatcattgtcttgttgaactgaagtgctcaatttttgtgttctaggccaaagctatggccaacgtgccatttttatatgaaggttgaaaggattcaatagatctctgatattgctcagctgatccgaaaagacatccaaatgcagaggagatacagatacccactggaacaggggtctttaaaaatagaggatgtccagaaactcctcagaatacattgatttctgtaacatttggtagaattattccacagttatcttttggaaaagaaatgagaaatatttgggaatagttcttgaagtttgttatatgatctggctctgtgtccccatcaaatctcattttgaactgtaatcctagttgtaatccccacatgttgggggagagaccacatgggaagtgattagatcatgggggcaataccctcatgctgttctggtgatagtgagtgagttctcacaagatctggtggttttataagaggcattttcccctttcactctacatttctctctcctgccaccatgtgagggagaacatgtttgcttccccttccgccatgattgtaagtttcctgaggcctccctatccatgtggaactgtgagtcaattaaacctcttttctttatgaattacccagtctcaggtatgtcttcatagcagcatgagaacggaccaatacagtttataaaataaaaagataatttgcaataaacttccataaaattcaaaatagttttcaaaaggagcattagctatgctaaacaaaaaagcagcaatatgaacagttaataaatagcaaagtctctttaaagtattgctttaggcatgcagaatggatttttttcttttttatctgtgatgggatttatcatcctagtgttagtttagtcaaatcagtcttcatggtttagaaagatgtccagctgtgaaaaggaagtcaccttgggattaaaatttgacacaaatgatcaacaaaatggagaatattttaccatattggacatgcattttcagacagatttgtggagataaattgtttctgattccagtggtcacacaagaagatactggcctcttcaaactaattaattgagtatcttcaattattgctaccccttgaagagttgcaaacaaagaaaaataagttgcattgtacagtatagtgagaaataaggagcaacaaaaatgatgcctcagctgggcatggtggctcacacctctaatcccagcaactctggaggctgaggcaagaggattgcttgaagtcagaatctgagacaagtctgggtaacacggcaagactccacctctaaaaaaattttttttaaataaatacatagctgggcatggtggtgtgcaactgtagtcccagctacttggcaggctaaggcaagaggattgcttgagcccaagagttcgaggctgcagtgagctatgactgcaccactgcactccagactgggtggcatactgagactctgtctctaaatatatatatatatatatatatatatatatatatatatatatatatatatatatatatatgaaaataatgcttcataaagtttgtaaagttctttctatgcacctgatagtctaagcaactttttaagataggcaagatcattaatactgccaatttaagtttgaatattcaaggcacttttccagcactttatacttattaaattatttaatcttgtaatggccatatgaggtaggtattattattgtcccccttttccagcaaaagagactgaaatagaaaaaagttaagttgcttcccaaggatatacaacaagtaagctagctggaattaaaactcagatagtctgaaaaactcacacaatcattgcatcatcatttttagaggtaaaaatagacattaaagtttatataacaagctattaaagatgcaactgaatttaaaaccaaggtattaatgatttgtggcctgatggtcttccttgagttacattccatttttcttcggataattcctgacttgccaaaaattacattccccttgaatataagtgccatctagactggtctacacagagactgtggtaggctggtataccacagatatttctctgcacttgaccacagtgctatctggaatttcatgcccacccatctctgtaggcttcagaatagagtcagcctgctcttgcaagactcttcccagatacaagttctcatctgagaagtctatagtggccagtttaatgctgacctcaaggaagaaggggaaagagagtggtcttcagactttaagattccagacctatcttcactttggcaagaaaaaggaaattactagatgattgcaagtataggcaatatagcattcctgaaagcagcttgcccagtctccaatattttcccaaggatacgtaagcatgataggacagaagtgtagaagtctcaaatcttaagaaaataagatattgctctctttagctaaagctttgctgagctttcttggtttactcctgttcaagcagttcttacagtttctatataggatgcttattgtatcagtcagcttgtgctgtgttatgctacagtaaccagacaccccctacctccaaatcttagtagcttacaacaagaaacagttttctttctttctcattttacatgtcaatcacagattgacttaggctctttatctcaagcccatgcgggctgaatgagcagcccctacctgggacctaccaggcccctggctgtgagaagaaaatgatgtgaaaccacagagtggttcttagagcttttgctcagaactggcttctgacatttctgaccacatttcattggccaaagcaagcctgatgtcaatggggaaggaaagtttaatcctttataaggatggagagtcccctaatattgggaatgataatacaatgatcagacttactgaattacattatattaggcataaggaggctcctatctgaataaattaatagggtgaaaatacaagcaagctgtagaagcttcaactaactctataaaagaaatattcaaggagtctaagcattgaaactcttttctacttttctcagcagtggcacagtgaaaaaaattaaaagtcatttcagggcatggtagttgacttgagagggcaggaaacatagcccagggagctgctgagcccagagtggaattgctcctccttcagcagctataaagcatgggccaggtcgtacagctccttatttagtaacattggcaaaaatccaggcttcatttataagtcactgcattgcagttcttttggagtacgttaccaggacttcataaagattgattgagttctgggaagccattgggttgaaagtccagatgtacataaatcaagttatagcatcatttaattcacaatgtatctgcccaagtcattttggggtggaagtgaaaagatttatagtaagtcttatgggatttgatgatctgaaaagtaagagatattaaatgggtgatttagctgcaagagttaactgcagtagtttaaaattgactcaagtcttcattgctactggtttaaaatgcatcttaaataattggaagtatattttgggagctctttagggtgaagagttaaacgtgatttttggcagtcaaaaataagatctgatttatattcagaaaaaactcatccatcaataaaatatatgtcagcaaactactttatatcttaaagcactgttctctaccacacttagttcagatctaaaaacttttacataaatctgttctatgataagaacccaaagttcttgaacttgataaaaagaatttctgtgatccttttagtcttgagccacaaatcaatctacaattgaaatcacacttgcttttatgtggaaggacatgaaaagccacaatcccaattcatgccctcatggtctctcactagccaggcacctggagatccaaatctgtagagtaggtgaagtttgctataatcttctctgagcccaactgttctgtattgctttcttttttttgaattcttttttttttttttcaatgacagcctccctctgtctcccaggatagagtgcagtgaggactccagtgatcttcccacctcagcctccggagtagctgggactacaagcatgagccaccatgcccggcttatttttttattttttatagagaccaggatctcactatgtttcccaggctggtctcaaactcctggaatcaagtgattctccagctttggcatcccgaagtggtgggactacaggctcctgacaccgggcctggccttcaatttcatgatgtttcttaatgcctcaattcccctttcctcttttcctatcttttaatcttttctatctttcctttcaaaatctattctttaaaagaagttatttttaattaaaatttaccatcaggtaccttaaaggctgaggaaatttaatctattagcataggcaattgtatgcaagtatcagtagaaaacaaagttttggccaaaggaaggatgatctaaagggaaattaagacaactgaaagtgaaagtgggatatattcctctctttttaaaatcacacagtggagcatatttaaaaacaagtattcaaaaggacagttgattaatacggatgttacatttctgtctgctcctctgacaattttacaggcatttttgatggaacaaattcttaaaggaacagagttttctccctcataatgaagagtacttcattatgaaagactgaactcaatattttttccaattaatactaatatttatttagttttacttaatgttcctgagaaatgttgactctacatttgattttattaaatgttgcatgtgaatttactttccttcaatctttaaaaattgcagttagaaaaatctagattctttccctgcctttgttacttctctagaagtactgtgaaattagggagttgaatttgaggtaatacttgagggtgttcaattctgaaattctccattggttcttttagttgaggacaagcttctttagtgagaaaaattactgccaaatttatctctttgttaaattggagcatgtgtgtattacttaagcataaagctaagtacactgtattaaccattgcaatgccattttctactggctattaaaaattattatttaatgtaatatgtggaaaactacccagtgatttctaaaactggatcttaagtttaaaaaatgcactattgattactataatacattttaaaatctaaatttaatatctaaaatgtagagtataatacatttcatatctaaaatataattacaattatctacacttccttttcattcttttcctataggtgtgttgtttttacattttgtctaaattactcttctcatttcatttgtttgatttttgctttcaattcacctagctaatacactctttaaaaatgtatcataatttttattcattgtacattatgttttatgtgtatttcattcaataaatgcatggacttgataataaaaattcaggctacaccaaagggcacaaaataaaaatataaagtcttcctctctccctacaactgtcctactttccaaagaggactatgtttaacattttttagttttggttcttgtggtgattagcttggaaattctaaaccactgctgttcaatagaaacataatgtgaaccatgtttaatctgtctagtagccacattttaaaaagcaaaaaggaataggtgaaaataatgttcatgatacattttatgtaatctcatttatccacaatgttattatttcacatatagtcaacattaaaaaatgaatattttaaattctatgttttatcttaactgtattttatacttatagcacatattaattcagattagttacatttcaagtgttcaatggccacatgtggctagtggctatcatattggacagtgaagatctagataatatgctaaatacatcaaattttttgtttagcaattttaaacagtatttgctagtttcctgccaaaaagatgaagaatttaacatcttgtgctacccattctatcttacaaatctcattaaatatgtatttttaggtctcccattagtcttctttattattttgaaaactatacctactcttcttttcttacactcgtattagacaatatcctttgaattccagctatgcaaggtgtggaaactaatattccctcacttctctccacctctcccactatgcctccaaacttttgtcaagctataataattacttttaaattgttaaggttcataacctttttattctgttctatcactttaataaatttaattttcttgtcttgttttaggtctctagaaatgtaaaacatgtgacagtatttgaaatattatgagtctggcaatttcattgtacaatcaagcagtgtaattgaaccctttggaagtacaatctcccactctcaatctgtgctacttaaagaagaaacgttgaatattaaggacaaataaattctcatttcctgtattctatcagtttctcagaattgtgcttcagtttagtttgtttcatatgaggatcatggctcattattcaatgttgtggtttttcttgaattctcttattacctttcatttaccttgttaactaagatgtatactggccattttatttttagattgtcatgccttttcatcataccacttaacataggaaagtgactgtcttcttaaagactgtctctggtagctcactaagttccttttctaatttgaatttattgccttctatgtctgctgctgagctatgattctgggatttaatttcattgctctattggataaatttgcagtttcttacatgccaagtctttccctttcagcaaacacaataatttattgaattatattctctagtaacttttaaaaaaaacatacacaagagaaataaactttctgaagctttgcatgtctgaaaatggctttattttccatttacactggactggcacattttaattttctaagaaacatcagatatctataatagccttttatgctacaaatgcacattagtgtgtctataccctgtggaaattaaaatccaagtgaatcagtaattacacagttgtgggatgaaataaattcttggacttctccccattagagtccccacagtgaagcaatattccacactttacctttagccactgttttgtaccagttgggaaatcaaaactttcattaaaccagccttcctggtagatacttggaagaattacaacactctttagcatgtttagaaatgtccttattcctgcccacattttataaagacataatcacgtggtagatgcctttgggacttttgaaatgcattctgtgaatgagaagaaatgcaaacatgttggcaaaactgattattttcattgtggatctcacgcttgctttggccatttttgttatcttttatttaatggctgccactgtttttttcatctcggtcattttctatattttcaaaagggagatggaaaaaaaactttgacttcaacaagcgccgaatctgggcgctggattctagcaatgctactgaggagcctttggcaggtggcgcagagaaagtcagctccaagctgcttcctgtccattgtccagctgtaggagaagggtctttcctgcccaaggacagtggtcctctcttctaaagagcaaggagctctctgaggtggaggaggcttgtgaagacttcccagaacactgcacccacctgaccaagaggtactttttaaggtgagcatattggacattgacctccattttcctccttaatacaagtaaaacgcattcttgagatgagaggagaaaaacaaattattttaatcactgccttctagttttcaaaattggagttgtcatcgtctataaatactgcaaaagtttttgtttttagctgagtctcaattacccagcaaaccaaggaatcctacctatgttattttctctcccaagtactgattagacaaagggcaaaagaggatgaaacttcagttttaatcttctctaacagttcggttgaaaggtttggtagaagagaaagtttgagaaaatgcatgctttgatcatccctattctatttcacagctttggttcagtggaagcaaatcagttttgccttggtttttgacagaaaaaatggctaccataggttcctgtgtttgggtttttgtggtataaatgcatatattttatggtatttgcatatatttttgttttcagaagcttctggtaagttgatttaattttagcagttgtgattacaactcttaaaaccaagtccttgtttatatatttcatctccattgccttgtagacttctgacttcttaactttttaaaagtatttcttacaaacaaactgaaaaatcatttcagtctaaatgttagataacacttacatgaattccttacaaaatgtagcaaaatcatactcaataaaggaaaaataataggcttagcctccgaggccataaatgcataaaattttaggaaaaaaaaattgctttagtataataatgttatccatagatcagtcatgccacttgctgaagagtacaatagctcctccacagaagaaactggttaagtgttgttgaatgagtacaaattttagtaagggattttaaaatcatctccattgcatcatttccaggtttatgcacagaagtagagaggctgacctacctggtgggatgggggatgcacaacggaagaataccttataaacaattgccctggccgggcgcggtggctcacgcctgtaatcccagcactttgggaggctgaggtgggtggatcatgaggtcaggggatcgaaaccatcctggccaacacggtgaaaccccgtctctactaaaagtacaaaaaattagccaggtgtggtggtgggcacctgtagtcccagctactcaggaggctgaggcaggagaatggtgtgaacccaggaggcagagtttgcagtaagccaagatcgtgccactgcactccagcctgggcaacagtgagattccattcccccctccaaaaaaaagtaaaagaaaaaaaattgcccttaattgctgattacctgcatggaatttacaattatggaaccggtatttaatgaaatggtttttcagttctaagaaaacttgactaccatgcaaatatcatgaaagaggcacccagagtatgtttctgtttgtctttaaatcttgccattaattcactccacaacatatgtacagggtctagagggatgaggaataatttaggtaaattttgattcagaggaggcagaagcataggtcctgcatgtgaggcactggtgaagtcaggtatcccccggaagaactaaggggtaggggtaaggaagaggagggtggaaaagagacacaatgtgaatgtaggatgtgatgaaattgaggtataccaaggtgaacattcacttttgccttgtgtaagctcttagatactgaagaaaactctacactctactgtgctaacattcactggggatgggccatggttggaccccaacaaagatttcttgtgtggtcttggccatttgccccagggttttcttgtgtatctcctatgtgttcctaatgtaaaggattagggttgatggcaatgatttgataagaaaggaaatcaaaattgcttcacatttgaacatcttctgaagctgaccctcaaattccactacactcctgtcttatacctggcttcggaggacctgctggccctgcaaggcgtttcagtttgtgtaacctgccaggttcctccagctccacttgagttacttttgcatccaaagctgtctttcccttagcttctatttgggttccagaaaggtaagtttagtactgctaacttataaattcagttaggtgaaaattcatttctaagacttattacttatcagtgattcaaccagggaacccaggtacctattggctctattttttggactacgccagcccactcttaaaattcataagggtcttgggagtcatttagtacacttctcatccaatattttctataagacacttgtccaacccacggtctgtgggctgcctgcagcccaggatgactttgaatgtggtccaacataaattcataaactttcttaaaacattacgaatttttttttttgcaatttttgctcatcagctagcattagtattagtgtattttatgtgctagcattagtgttaatgcattttatgtgtggcctgagacaattcttatttttccaatgtggcccagggaagccaaaagattggaaacccctcttctataatatccctgaaagatagttgttcaacttctgcttagccatactgcatgagatggaatttttttccctcataaggaagtgtgttgttaagaagttctttataacatacagtggaaatctgagtctccacattgtcctatttttactctgttaagcaatccagaaaactgttgactaagtacaatgacttcactggaaccacaaactctaagaagaaagatcagcttctccttttataaatttcctgccttctactcaaagcattgaataatgttgcctttttcagtgcaaataacccatttaagatcataatagtaagataaatctagaatttattgtgtacattattagaaaattcttgatttgtcctttctgacttcttgtacatatttgttaatcaggaattttgaaattcatttcttcaaagcttcctcaagtctgggagtgttgccaatttgcatggaagaacaacatttcatgactgcattcataacgattaaaatgtaattctaatgcactaacccaatttcacagcacatcaaaaatttaattcaacccaaaatgactctcacagatgtctgataattttccagtggatgttatttgtaaggtcagataaatttgagcattttagaaaattgtcaatcttgccaatacaattttttgtaaatacagcaacaggaatacctccagtatcaagctatgctaatctttacagaatgaagcccctttcatcaaaggtagctgagagtggagaaaattgggaaagagtccagccattgcatttctggtgggttcagctaaaggggccctgaggctgcagtaaggaagtccccatgttcaggatcctcatggctttatcagtaggtttgggggagtcagagtgttagaagccaaagattttctgactgtggcacatatacaccatggaatactatgcagccatagaaaatgatgagttcacgtcctttggaaggacatggatgaagctggaaaccatcattctcagcaaactatgcaaggacagaaaaccaaacaccgcatgttctcactcatagatgggaactgaacaatgagaacacatggacacaggaaggggaacatcacacaccagggcctgttgtggggtggggggaggggggagggatagcattaggagatataactaatgtaaatgacgagttaatgggtgcagcacaccaacatggcacatgtatacatatataacaaacctacatgttgtgcacatgtaccctaaaatttaaagtattaaaaaaaaaaaaagaagccaaagactttctggctttgtggaaggctgagggtgagcaagcttctagaagacaaagagaaagtcagttcctggaatgcatatctataattccttttttgtttttgcctctggtgacatttctaacaatatacagttggctctctctatctatgggttccacattcgttaattcaaccaaccatgtatgaaaaaatattcaaaaaaatttaaaaagaacaatacaaaaaataatacaaattttaaaaatacagtataacaactacttacatagcatttacactgtattagcttaaagtatacaggaggagattacttaaagtatacaggaggatgtgcatagattaaatgcaaatactatgccattttacataaagaactaaagtatccttagattttggcaccactggggatcctggagccaatcccccatgaatacagagggataacattaaaagcgtttggatctgggagtccctttaggatctggaccacaccacttactggccgtttatttctatcaagtcattgcctcctttggcctctttttctccgtctgaaaagaaggacatgcaaaactaatgccttgtaaggccccttaagtcctaaactactgtaaatgttataaaacaaaatgagtttaaaagtgagatgccggccaggtgcggtggctcacgcctataatcccagcactttgggaggccgagatgggcagatcatgaggtcaggaattcgagaccatccttatcaacatggtgaaaccctgtctctactaaaaatacaaaaattagctgggcatggtggtgtgaacctgtaatcccaactactcgggaggctgaggcaggagaattgcttgaacctgagagggggaggttgcagtgagccgagattgcacaactgcactcactccagtgtgggcaacagagcaagactccgtctcagggggaaaaaaaaaaagtaagactcctggtcggccaagatggcaatttacacacatggtttctcatcatctgtcactatactttgctaatacctgggagatgcatgacttgtgggaacccccaagggaaaagatgagagttttcaggagcacttgtaggactaagaataaaccctcagaataaattttcttggggacccgacatttatcttcatgtccctcttgcactacctgctcacaattaaagtacaacatgatatgtatacctgcatcccacaggtatccattgtcctgttagttcagacaggctatctaaacgtctaaacccaagcatttttgttctgtgtacaagcaaggtatctattttgtactcagtattaatcacttagattattttgcctcccaagatatcaatttgttcaactataaaatgaatatatggtgtaaatactatcaaatagtcccacctgggttaatatgattttaagggtatattgagtagctacgctttgctattaactctgccaggtggtttggcaaaacaaagacacgtaacacataggtgtagacttcaaaagagttctcattttatttgcgtttgaaagcatccatgaaccaaacatgaattggaaatctcaggtaaagtaattaactaaacaaataaaatgtaatgctttttcaaaagttaaagtttcaataaagtcccagagtttgccagctttaattttgtttatttttaatattctgtgttttgaatgagaaaatcaagccaggcaatctaattgttttgcattgtaaatcatcttatttgacttataagacagaatttgctaaaagtaattgaactatttctcactcgtttctttgggtatgacatcaaaaacacagggaaaaaaagaatttttttcaaaattaaaaacttctttttatcaaaggacacaagcaacatagtgaaaaggcagcccacattataggagaaatgatttgcaaatcatatgtctaacaaggagttaatatccaaaatatataaagaactcctacaactcaacaacaacaaaaataaaaaacctgattaaaaaatggtcaaaggatttaaatagatatgtcttcaaagaagatatacaaatggacaatataacatgaaaagatgctcaataaaagccacaatgagatattacctcatacccattagagtagtttctatttttaaacagcagcagaaaataagttttgctgagaatgggagaaattggaactcttgtgtacataaaatgggtgcagccactatggaaaagagcatggcggttccacaaaaattaaaaagtagagtatgtgattcagcagttccacttctgggtatatatcaagaagaattgaaagcagagtctcaaatatatattgtacaccaaagttgatagcaacattactcacaatagccaaaaggcagaagaaattaaagtgtccattgatgaacgaatgtataaacaaaatatagtgtattcattcaatgaaatattattcagccttaaagaaggaaattcttacacatgctgcaacatggataaatcttgaagacttttttttttctttttttttgagacggagtctcggtctgtcgcccaggctggagtgcagtggtgcaatctcggctcattgcaaccctcggcctcccagtttcaagtgattctcctgcctcagcctcctgagtagctgggactataggtgtgcaccaccacacccagctaacttttttttttttttttgaaatttttagtagagatggggatggggtttcaccatgttagccaggatggtcttgatctcctgacctcgtgatctgcctgcctcagactctcaaagtgctgggattacagatgtgagccaccgcacccagctgaagactttatgttacataaaataagccagtcacaaaaagacaaatacttccatataatttcacttacgtggggtacacagagttgtcaaattcatagaaacagaaagtagaatagtagttgctagagactggggaagggggaagtagggcattgttgtttgatgggtacaggatttcagttttgtccgaagaaaaagagttctgtggatcgacagtggtgatggttacacaacaatgtgaatgtacttaatgcccctgaatcatgcacttgaaaaatggctaagacagtaaattttatattctgtatatttgaacacaataagaaaaataaaaaagaaagtagatcaattatattctggcttttattattattattattattattattattttgagacagggtctcacattgttacccagcctggagtgcaatggcgtgatctcggctcactacagtctcgtcctcccaggttcaagctatcttcctgcctcagccccacaggtagatggcattacaggtgtgcaccaccatggcctgctaatttttgtatttttctcttttgtagagacaaggtttcaccatgttgcccaagctaatcttgaactcctgagctcaagtgatctgcctgcctcagcctcccaaagggctgggattacaggcgtgagccactgaacctggccctggcatttttttatcattataaaatgtcacatttattgctacagtgctgttatatacaggacaggtctccaaattgcctttaaagaggatcgtttaaaaatcccaataatccagccagctgtgttgacatctataaaattatttttcttaaaaaaaaattactcgttttgaaaaccagttaccttgaagcactcagagcacaatttccacccaataattgtggttttgtccacctcccacatttgttccattttttgtgttgggttaatctcattatacatgtattatatatatgtagatataaatatatctatctatatacatagatatctgttatatctatgtatatagataattatattatctataatataattatatagataattatattatctataatataattatatagataatataattgcagataataatatagacaatataattatatctgcatacagatataacagatatctatataggtataattcaattatgtaattgaattacatatagaattatatatatacaatttatttttttgcctgattataaaaactaggctatggggaatgatggtcttcacagggggtatttcgtataggtaaactatccagattatttggcttttaaaaactgtataggacatatatgcccaatctcaaccatggctgcataataaaatcacccagcaagctatttaaaaataatagattttggttctagggtaaagccctgacatggagattttaaaaacatcaccaagtgattgtaatgtgtggctagaattgaaaactactgccctagtttctcaatcattgaattatattagtctgatcatttggtttgttcttggcactgatgaccatgaagtatcttatcttagtttgttttgtgttgttatgacagaatacttgagactgagtagtttagaaaaaattgtttattttgctcatggttctggaggctgggaagtccaagagcatggtgccagcatcttgtgaaggccttcatgctacatcattccttggcagaaggtagaagggcaaaagagcatgaaagcaagagagagaggtggccaaacttacttttgtaactaatttactcccacaataatgacattaatccatttataacagcagagccctcatgaccaaatcacctcttgttaggccccacctccaaactctgttgccatgggggattaagtttccaacacatgaatcttgagagacacactcaagccatagtatatttacattgattagctagcttttcataatgaagaattcaatattagtaagccacaccatgaaatcctacaaataagtacagtatgttctgagataaattaaaaacaattcataacaattcagtagcacatttatcagatttgctttcagtcttgaacaaggtaagtcaataattcatttgatgcttaatggcagttaattcttatgaagatcattcaaatataaaaacacaacaatgacctgaaagcctaacctgaaggttcttatcaagagataccaaagtaaagacaacagaaaacaattgcagaatatttactatgtgattgttcttatgggagactcctgaactaggtgacaaacatattctcagagattcaggttcattatttctgttgggtattaagccattatgctgtaaatttccaagcatgagttcttcccaaagcccatttattcttcatattgcctcatgcattctcaaagtcctagcatcaaactaaaggcatggtttatttcttctctgggagctatagaagtaaactccatttgaagtcttggccctatgccctacacattgttgccagaataatcttggcaaaatttatgctcaaagacttgtaataactctcactcacctaaaatagagtaactgtgaataacttaatctggtattcttagttttctagacactatctttccagccttattaccaatgatttcactgtgcattgctgagattcagctgacctaaactaaatgtggctagtctgggctccaagctgcaggttgggcccaatgcctcgtccacaggtccctcttccttcttgaactggcagctatgtgaggcatgatcttctctttgtgatggatggctggagcacaagaaggacataggcaaacatgttgacttttacagtgtaggcttggagttggcacattgtcactttgggttatgttccatgggccaaagaaagtcacgtgactgggcccagcatcagtggggcaaagaagtgcatgctgtctatagaagtcacggaggggagtggtgaatacatatttgatgaacaataatataatatacccataaaatgtaacagaataacatttttcataatcaataacattgctaaaattattaaacagtttttattttatgtaaaataaaatgaaggcttaacattgcctgggtgaagtttgatataggatttgaagtccatgttcttaaattgttgagttttttttatgacttccattgaacagagatcaggtccatttactggaaagaattgtttgtaaaccgagttctttctatggccatttttcaaggctggaaattgttccatgatatgttctttgagtttctttctctacctccatcatccctgataatggctaagctctcccagaagtgcacacagatgaggccaaatgtagtactgtcttggtagagagaacaggggctttggtacaagtaaaatgagtccaccacagactggctctgaactcaggtcaagtcatgtaaactcacaagtctatatagttacttagtaaagcttgcctgaactgactaatgggttgctgtgttgattacgtgagatactatcagaaaacacaattcaaaatattaattataaaatagatatccttatttatacaaccaaagtcacatgtcacttaaagagggggatacactcagagaaatgtattgtttagtgattttatcattgtgtgcaaacatcatagagtgtactacacaaacctagatggtatagcctactacacgcctaggctatatggtgtagtctatcgctcttgggctgtaagccggtacagcatgttactatactcaacattgcaggcaattgtaacacagaggtatctaaacataaataaactttgaaaaggtacagtaaaaatatggtataaaagataagaaatggtatgccagtaaagagcacttaccatgaatgcagcttgcaggactagaagttgctctggctgagtcagtgagggagtggtgagtgaatgtgaaggcctgggacattactgtacactgtagactttatacacactgtacacttaggctacactaaatttatttaaaataattttcttcattaatagccttagcttactataacttaaacatttttaatttttaaaacttttcaactctgtaaaaataatactttgcttaaaatacaaacaacatacaactgtacaaaaatattttctttatatccatattttttgaaaaaaatttatatctatcttcatttttatgctgttgaaaactaagagataaacaatacatttgcctaggcctacacagggtcaggatcatcaatatcactgttttccgcctgcacactggaagatattcagggtcaataacatgtatggagctgtcattttctatggtaactatgcctacttctggatacttcctgaaggacttgcctgaagatgttttacaatggactttttgtttaatacgtagaaggagcataccctaaagtaacaacaaaaactctagtatagtaaatacataaatcagtaacatatttattattattatacattattatgtactgcacacaattgtatgtgctatgcttccatatgaccgacagcacagtagctttgtttacaccagcatcaccacaaacaacacaagtaatgcattgtgctgtgatgatgtgatggttacgatttcactagacgataggaatttttaagcttcattttgatcttatgggaccaccatcatatatgtggttgttgactaaaacattgttatgcacttttgaaattacataactgtaatttgtctagactacagtccctatatattctagtttttttctactgtttacttatttaatttactttgtctttagctagtagtcagttgtcattaagaataaagcaaaaattttcatttataaacggctaatggcattcctacattaattcttgtccttagagaccatcgactgaaatagattataataaatatgatcaattagctaatcatttaatgaatcattcgggacacaataattgtttcaaaatttccattgcataccaccacctaatagatattgaccacaaaagaaatatctcaggggaggggggagagatagcattaggggatatacctaatgctaaatgacaagttaatgggtgcagcacaccagcatggcacatgtatacatatgtaactaacctgcacattgtgcacatgtaccctaaaacttaaagtataataataataatcattaaaaaagaatgaattaaaaaaaagaaatatctcattgaatcaagtaattttttcctcatttttattatacgtgataattatctcaataaatatctcaagacttactaaaattcaataaagtagccctgttaaaatacttaggattgctaaaattctccatttcattttatgtgtgaatggtttgctgaaaagaaaagaaataaatgattgagacatatatcctggatttatttttcatcttggattttgatctttagcaattttatttaataacatctctgtgaaaacccatgatttcatgtcattggtagttttgacaagttcaaaagagccaatcacagatttattttataacaagatttaggctgggcgcaatggctcatgccggtaatcccagcactttgggaggctgaggcaggcagatcatttgaggtcaggagttcaagaccaccctggcccacatgatgaaatcccgtctctactagaaatacaaaaattagctgggtgtggtggcacgtgcctgtagtcccagctactcgggaggctgaggcaggaagatcacttgaacccaggaggtggtggttgcagtgagctgagatcacacaccactgcgctccagcctgggtgacagagcgagactctgtctcaaaacaacaacaacaaaaaaaaaaaaaaaaaaaaaacaagactatgtttctgaagtaagcctgccaaatttaggcaatgtatttggaaagactttttagttctaggtgttatattctttacagctagattcatttaactggagagtacttacagtatgatcgagaaaaataatacaaacataaatgctgtggaatcatggaactgtgtttatatatcacagatctcagagatataaattaatcattcaatgagaaataccatccctgaaaatgaacatgactataataaaatcaatgagcagctatatataaaatccatctttcttaaacgtattagtgttttataaacactaatataaaatacaaatgtgaataaatataaattttctccaacaattttgtctttagtttgaaaagtatagtcttttgcaaagttcataaattggtatgtaaacattttcagttatcctagggtggagatcatcttgaaacttcaaagtgaacatattgacataggtcacagaacaacacattaataagagcccccaaatgaattgccacacagcagacttcattccatcttttttacatgatgaaatagtcttcctgttaatgaaaaatgctccaggccctgagaaggcctgggctgcatgagtcaaggagagggtagcatgaagacaaaaggattctaattccaagtagtagcatatggagagcccgctgccaaagggtttcagttcctcaatcatctgtggtcttgacaatgtgactgtgcaactaactcctccctgcagaggatggtggcatctgtttctccaccttttgaatctgggctggcctttggacttggcaaggccaatagagatttgagcctgggtctcaagggacctggcacttctgctccctttctgttggagtcctgccagcatcttgggaacaagttccagaagatagctagaggatgggagcacatgaagagcagatcacaaccatccctggggagcccagcctggaccagctacagccacccgtctcccaaacatggagagagacccccgagtttagcagagctgcatacctgacccacagtgaaccacatatgcatgagggagtccaggtgagatcacaggaacatccagctggcccataagcttataagcagtaatatctacttatgattcttagctactgcttttgagttgtgccaactcatgctgagggtgcagtgttttttagaatatctcagtgctttctaaaaaatttttatttttccccccacagaaactgctattttcatgctagatttaatcaaacttacagtggttttgtagttgtgagataattcattggcttaagcacatttatcgaaactcctataaaatgtgtttgaattaagtaagcaaatcaatttcctgtcttgttgtcctataccttagactagctaactagtaaatttgtacatagtaaaaagtaaatagtgaaaaaaggtacaagtaagaagtagtaaaaataaagtagcaaaatattttgttcaaatagcactgccagtaccaaaagcgggagtccaaatgaaaaaaaaaataactaaaacgaatattagtttgcagatttaaaagttcaattgaacatatagtattgaaagcagaaaagatgtcaagatgacagaactaagtctaaatgtaactttgctctcaaacatgtcaaggtatacattaaaatgaatagaaaattttcacaaattaaattaaaaagtagctcgggaggctcaggcaggagaatgacgtgaacccgggaggcggagcttgcagtgagccgagatcgcgccactgcactccagcctgggcgacagagcgagactccatctcaaaaaaaaaaaaaaaaaaaagtagcgaacacatatcctataaaacatggataatatagagaaattctgaaagggtaaaaactttcaaagcttaaacaaatccagaccaggaaagtataaatacaaatttgaaagtatgatactaatgtcagagaagtttgaattcaaggaagagtctaaaagagtttaaacacataaagatgaaacatttataacacgcatttacttaaataataaggtagcaataaataacatagcaaaaacaatgacaaaatcgtaaatttcaagaaatgctaggaaaaaacagatacagataagaaaaaatttgaaattctgaacaaaataattgaagctaaagtaataaaaatatattaaattctatagtcttatagaatatacttcactttaatcacttatatttataaagcaattggctgtatattaggggaaaagcagaaatagtacagactacattcttgatgcacacaggaatacatacaagacataaaaaataataacaaaaatcagggagaaaatctacaaccaccttgaaatttgcaattttcttcccataaatgtcaaagatcaaacaagtaatcaaaattataattgcaaagtatttagaaattattataattaaaacaataaatattagaaattaaaagcagagaaaaatatatagccttgcatatctatataactagtaggaaagaataaaaacaaaaaaatttagctactcaagaccaaaagttagaaaataataacaaaataaacctaaaaaagggaagaaaataataaaagcaaaattaattaggaaacagaaagtgggtaaatagattgaaaataagcaactaagggcagattagtaactataagtaacttgctaatgaacctagtcaccaaaaggagaaaacagaatattaaaatttgaaaatgaagagtaaccaaaaacagagaggaacctgaaactacccaaagaaagtatgttgcacactacaaataaattggaaatttttcctaatattgaggattgtattgaaaaacagaattcccaggattgaccccagtcacagaatgtaacacatatttacacattcgcttcctagaagcaatcacaagaaattgataccacttaccgctttgggaaggaaacttggcagggaaaggagcgaagttcctttttagttttattcctttctgaactgtctgtatgtccaaatttgatttttttaaaatataggcttattgggaaattagattatatatttatttgtagtaaggcaaatggaaaaaaaataaagaatagtggctcatgcctgtaattccagcactttgggaggccaaggcgggcagatcacaaggtcgggagatcgagaccaacctggctaacacagtgaaaccctatctctactaaaaatacaaaaaaaaaaaaaattagccgggtgtggtggtgggcgcctgtagtcccagctacttgggaagctgaggcaggagaatcgcttgaatccaggaggcagaggttgccatgagccgagattgtgccactgcactccagcctgggcgacagagtgagactccgcctcaaaataaataaataaataaataaataaataaataaataaataaataaataaataaaaatgaagaataaagggcacaatcatgagtagaacacaaaggctgatgatcaaggagtcaagccagagtgatgatgggtggagattggaagaaacagacccagagaccttgtgctgggcaacatctgtttctacacttgcctggctacctgacgtactatcactcatagttctaaagtataccatgttggtatatttattagtttttcaatatttatttagatttattttggaaaaatatccaatatatccagctatttaacaaaattgaggattaaaactatttgatttggtgctatttttggacatgcatattacaccaacagaatagctgctgatgcaaacctgtttgttccctctagacaaggagattagaaacggtaggtagattcctccttaagaaagaagcaaataacttgaaatacaatttgttttgtttcttgtatttgaaagtgcagtttacacaagccaaatagacaccatatggccttcagtaatttgacattgaagagcaatgcatgatttgtattctatttccagctactgcacagtgaatgtgctgtgataccatgtttttaaattcctctctgcctttgcccttgctgtctcttagaggcaggacatttatttattcacttattcatttcttctcttttttatccagtgaagtctaaaagagattgaaactaaaaataaataaataaaaaagttcaaactaaaatttctcctttttagtgacctcactgaagctgtgtcattatctggggtaaatacccaaggtttgtctctccgccaagaagattaaggacatggacacacagggcaagggagtttaggagtggaggtttactagctaaaagaaagagaaaggagaatagctctctctctcgtgagagaggggctcccgaaagggaaaaaccagcctgtggcatactgcaccagattttataggcaggcttcaggaggcagtgtctgatttactagggcccacagattggttggaccagatgtgatgtttatatagcgcacagggaaggctggccaccccaccctaatcttattatgcaaatgggtttttcacttggccagggccaacttgtctgctccttactgtacacgtagctggcaaaagaagggaacatggagtcgccattttgcacatgcctagtcccagatagccttttcctcttggcacaactgctggcattcacctgtgcaagcttccagctttcttgtctatgtctgcagctctattttacaggctgctctttgttagaaaagaaaatgatttgggggctgcttttcattaaaaggaaaactttaccaaggactctcgtaccctcactatctgcctaaataattttttcttaactcctatgtcatcaccacctctgtgagttaatattgttttgttcatacccctaagtatagcactattgtgtattgtgatggtatatatagccctgactcccccactaaaccccaagcttcacaaggtcagggccatgtttcattgttttagaaatctgtaacacctagcatgtcatagattatttttaaatgttaagagaattgcattaaaaattaaatacttaaatatttttagatcaaagcatcaaggttaatatctttgtaaagggaataatgttctattatgagtggtaataagattttcccattaagtttgattgaagaaccccagtttcacaatgcagagtactaaccactatacgatcacagctgaaggaagccagtttcaaataccacaggtcatccatcattttatctagcacatggatatatatgaccacattcgggttcccaataagtaatgagagaaacagaagcatttaatgttgccaaaaaaaagaatcataacatggccatgctgatctgtttgtctgtcatgataactaatgcagctttttttgataaccaatagaaataatgaattccctacaagtacatagtacttacaataatattttaataacctacttcaacatgaattttcagtcctcttggaaggctaacaaaatgatcccctcctccccaaaattgcatcatgtatttgttcatttaacttttcaatcaatattcatttatcaggtgcatgtccatttagtagacactatgctagagacacttatacagcataggcgagtgttttaaaaagtaaaaatactttatgcattcatctcttcctcactgcactgccttgaccccacacaagaaagtgtgtagcagtttctcttgggttttgcttacagcttctccaacagataagaatattttatttcatttaatttcattttaaatttattacttcatgaaagtgagataaaatttgcctaattatcataagaaatatggaaatgaatacgggacattttctaagcacatgcatagcacagtgaactcactgcttccactctgtgtttctcagtggtggaggaattagtgagtccatcagtgcctgccatggggagggtgaggggcagggttcaggcctcacatttatagcaggcctcatcctgttccagatgtaatcgccacatactttcacatgcagccacagtgggaagttgcagggttgaaagataataccacttgaatccttgaaaataaacactaaaaatacatccaaatgtttaacccagtttggtcattttttcattctgttttcttcattttggttacttcttaattttgtttaaggctctcactaaattatttgaatcatgatcctggctcagtattcttattttctcatttttctcagtgccttatttcctaaaaccttaaaagtcaaagatccctggagggacaggtgggggtgaggggagaaagacaatatatagagctctcaaatatgtctttcaaaagagtgccataaaaagcttttaagatggtatttatttacttacaatttatgcccctcaaatcaaagaaaacacagtatggtgtctcttccctcaatgttattgcccccctcccttccaaatggcattaatttaaaatgaaaaaatagggtagaattccgtgttcttccttcttcccaacttggcaccataatacgcacgctcctcctccccaccaaattcatgccttttatcaatctcattggcataattacaaggagaaaatttcattttaattgtattcattttattttagaaaggagactgaaactctggaggatttataaaaaatatttacaaagctatgaagtatgtgcttaagtaaactaatttcaccggttctctttatactttttaaaatttgaaagtagggaaaatttaaaaataaaaacatgctatattctcacattaaaaaaaaatcctatgaaagggagaactcaaaaatttgttctctaatcctttgcccttgaggtcaccgctgttcagagcttgatatttgttctttccaagtttttcttagacttattgtgaaatatgtaagtgcttatcttgtaaaaatagtattgagcacagggcttatccttccttgtctggtacctggggagatttgggcaggtggagatactggtgtatgaggaggacctgataaggaagtggttgggctctgaattggttggtttgcatttgaaagttttgctagcaggagagttgttgacttactatttctaggaattagtgaaccttgtgaggcaggagcaaggccctggatgtcaagcctttcagaatacagaaaatcaaaagacacaaggctaatataacttcatactgcttttttaatttaaagaaacccagagaatttgcttaagtgtttcaagctaacaaacattttattcgtgtggcataaataatacatgaacagacttttatgagtaatataacatctgcagctcttagaaaataaaacatagttaattagggatggcaggaattatgtaatcattacttttatgttttgttctttctaggtcattcaaactgtcatctacacatgaataacaatgaaattctcataaagaagcagaaatacccaggaggcatgaagagtcatcatgcttcaaaagtacatgtattaggacttcacgacctcaggaaaagtagactccgtaactcttaaaagctcaatcttggagaggagaaacatgctgtttgatgacatagcacagaaacttgttgaaatatccttggagcttgagatgtcgagagcgagccatcaaaatgttctcaagaattaaattgaaaaatgttgcttcaaaatgtcttagccaaccaaatacaaacatttttgtcattgtgacaaaaaaaaagctcaccaattgtctttgctagtctcagcacagcccaagaggagcatccttcatgagccaactgaaaaacagtgtgtagtctatgcttctgaccagatgggcttctcttgtcaccataacattatgtattaggacttcatgtattatgtattatgtcaacactttattcattatgctgatcatactctgtatttcacttgctctggttatttgtaaagcttttcctatttcatcattaaattatccttgtattttagcaactgcattttagtcactctatattctttatagtgcctgcccaaatgacatattaataagcattttttctgaatcaataaccaacccccaaaaaatctgcagccatggttgtaaataccgtacattccaaagaaaagtggaaatgaatgaaggaccaattttgaggaagaattagggttctcaaaaattcaacaattacaatcagtaagttttttaaaatttaacaaattcaacaagtatgtcaacaagtattcaacaagttagagttataaacatttgttcaaaattttacacgtggttaataccttcagagcagttagcagcaagattctcatttttaaatctttacccctttgttcattttaaggcaagatggagaccatgttgatgtcagagcaattggtccagggttgtgtgaggagccactaggaagggagaaacagggaaatgtggacccaaacagcatagtgttccccagaaacttgggttggacacaagagtgtacatgcaggaaaaagtaaaatcaagaagatgtgttaatctaaacaatgctgtgagcaaatgagacacaggtctccaggggacactctgagaaactacacagaatacacttcaaaattgtccaccagaaagacaaatgagagaagggatgatccattgactgtcttctaccattggtcatgttggccgaaaggctgttcacgaccgtggacttcaaagattgcacctgcttcagaatggctgagtagtttgcagaaggcatcttaacagatggtaacagagaagcaagagataagtgctgcagctgatgcaaggtgctggcagtgacactatcacaaagctggttgctgtaaaaatgtggccaagaggatgtgagctacaacgcaagagtggttcgacatcatttctcagaagcacatgagtctgatgcaaatctattgttcttgaaataatgagcacaggaccatatttgtcccttctggacaatagtcagagaaaggagcacccacagagagaaaagatctggtaatactagttagggagtggaagaagccaggtgatatagtttggctgtgtccccacacaaaatctcattgtgaattgtaatctgaattgtaattcccatgtgttagagctgcgacctggtgggaggtaatttaatcatgggggtcgttaccctcatgctgttcttatgatagtgagttctcacgggatctgatggttttataacaggcttttcccccttttgcgtggcacttctccttgctactgccatgtgaacaagggcgtgtttgcttccccttctgtcatgattgtaagtttcctgaggcctacccagccatgttgaactgtgagtcaactaaacctctttactttataaattactcagtctcgggtatgtcctcatagcagagtgagaacagactaatataccagggcacagaagaagcctaagactaaactgcacctctctgtgctttaaacacagaccagcacctggatgagtgtttttctttttcttctgtgcatattttttgtatttggctgctttttaacttgccagctctgacagaacaatgccatctctgagacactttttatctacacataaattaagttactttattgctttagtttctctgagttttgtgcattttagggagagctctcagtgtttcctgcttacagtcttagtttaggctcctccaaaagccaaccctgagaaaatgatgtagatacatgtattttattttattttttaagagacaggagtcttgctatgttgcccaggctggactagaactcctgggttcaagtgatcttctcacctcaacctcctgtgtagttgggactacagatgcatgtcaccatgccccaggtagtttgacaggtgatcccaggaagtgcaacaagggagtgaggagtgaagtagaaaagggaagacagccaatgaaaggtgtgtgcacaagggagcagggagcaggtaaccgcaatctcaagctttctgagagtgtggcccaaagggtgatagggaatctgggctgtttatgcaccagttccagtttctcactggttgaaaattgctgctgggaaattaaactcattacacttctaggcagagcaaactcctgtactgccaagaaagccccacaggcagagaagcaagcagagaggcgtggatagttgaggtagaaagacatgggtgtgtcgcgcagctgcagtgaatccagacatttggctgacggacatagattggggcatcagtagcttctacaatacattctgagattattttgcaaaggacaaaaatccttgagcatggagaaaaacaatagcaacagtcttcttctagcatctagaaggaaagatggtaagttaattagtaaagggttagaggcagttaaaatgaactctgaaactgagactatttgttaaactttgcagaccaaaactttaaactggaattggatcactttaatgaaaatcccctttgctattgctgcagaacaaatgaggaaagaaaagaaaccaacatgtttattgctttcacctataaaccaagaacctcactgaactatgttaagtaacaactgtttggctctgtttctgtgaagactacatggggactgatggatatttttaaattttctcttactagtcattgctctggttcattactaagatggagccactcaaataatgagtgctttctgatagaaaagctggatgacaagatatgaaaataggtcttaaacacagtggatttcaccagggctagaagcatgggcagagccgaaagagtccagaaaggaaatactctcagtggtatcatagattttaaaaattcaccccaattcttcatttcctcttaattaagttataaattcatactactgcctagtggactgagtgaactgccccaccccttgattctagatttggccatgtaacttgctttggaaaagaagttgttagcagacctggcataacctgtatgctggcttatcttcttggcaattgtgatcatccatgagacgaacatgtcccatgggctgctatgtcttctccttcagcctaggccctggaaggaaacgtggagcaaacttgaacccatcatagccaagagcttcagtcttggaacataaatacggaaatagagctgcccaatcaagcatattctaaatgagtcaatagcagtcaactcaagaatccaagcatgacagcagatgcttacttctgtgaccactaaatttgtgggtgaatctatgaggtaacattatagcggcagtagttgactgatataagtggtagattattttttttcttgcctgtagttagggtgataattataacaggggaataaagacttttgttaagaccaaagttttactgaggaaacccaaaaacatgaaattattaggaaagagccaatgggaagggctccctggagggaatctgtagaggattctgggtcaagtgactgctgtcccattgacaaaattctgcctcctctccagtgattgtggatgatctgagtagatgaagacaatgaggctctccaaaataatgttcacctcttttcattattttttgtttttgataaacattacagaacgtttggaaagagttaacactcaggttttgaaaaggtgagctttcctgagtatataggggaggttctcaaatgaaaatatattttaataccttttaaaatatttaaacaaatcagagctcctttatgccgatacatctctgaagaaaagcttattccaaatagttgtgctacgaagataatgtatacataatattatactgaccttttggacacagaaggatataccttcaaatcttttcgagtacaatagaaaactatttaaataataaagatttaggagagtcatacaagtgtttttgaatgtttgcttattgactttaaatatacttcaaattagaaaatcaacattattattattattattattttgagacagagtctcactctgtcgcccaggctggagtgcagtggcgtgatctcggctcactgcaacctccgccacccgggttccagcaatttttgtgcctccgccttccaaggagctgggactacaggtacccaccaccatgcctggctaacttttttgtatttttaatggagatggggtttcgccatgttagccaggctggtctcaaactcctgacctcaggtgatccgcccaccttgggcccccaaagtgctgggattacaggcatgagccaccatgcccagcttagaaaatcaacattattgaagaacttgagatgaaagtcaaagatctagtctttgcaccgccatattccctaatttgacagcaagccttactggtttgtggggagggatttctataaaaattttaacgaataaataatccctttaacatttataatctattccagaacattaaaaagatgaaaaccttcctaaataattacatgtggcttgacgaatgctaatattatgcccaataaagagagcaccagtaaagagaatagacattaagctcgatgcaaataaaaataatgaatacaatattttcaaatttactgcagcaacatcttaaagtattaacaatgcatggcgatcaaggaaggtttattttaggaatgcaagaatgttgtagtaataggaaacgcatgcatgtttaaagcactggattaatagaataaatgagcagaacatatactatctcaacagtctttggaaaagtatttgacagactatattagccacccctgtctaaaaaattaaaaactctcagggagttgggaaaaagaagacatttcctaaatttgacagattgccttcaaaaaaactgtcaaataccagtgataaaatgttagacttattctcattaaaatcacaggcaaggcaataattccacaaatccccattattcaaaatactcctgagggtcctataaaaagagaccaaaacattgataaatactagaaaaaaataaatcctttcacattaaaatttaaaataatgaaataaaaacacattaaataaatagatttgcaagatgtctagggatagcaaaacatacaaaaaccatcatttcaatatagtaacaatgagccatcaataaaaagatcccattcaaaatacagcaaaagcataatatctgtttccccataaaaccttaaagttactaaaaactcatatttaaagtcagaaaaataaacctaaacatcagaaagtgagtaacatggcttgaaatgggaagcctcaaatttataagttttaaattttttcttaatctattcagcgttatccctattaaaactctaagggtaattttaaatgaagttattccagttgattcaaaatgctatctctaagagtacatgcataagaacagctggaaatattataataaagatagcattcatatgcgtagaaaaggaataaataaatggtatttaaatatgtggtgcataccattattattccatttacactttacacagttgaggaaactgaaatatagggaagttaaatagcctatcaaaggtcacacagctgccaagtggtgaaaccaagatgcaaactcggagccagtgctcctcacttacttaccagcgtgctattctgcctctggcaaaaatatgcatgtgtgtatacaaatattggacaaaaagttgacatccgtcatacgcaaagttcccatcaatcaatattaaaaacaaacaagtcaatagaaataaaaatgggaatagtgtctataagcaattttcaaaagaataaatagtaaatgtatgaaaaaaatgttcaaactcacaattggggaaatgcaacttaaaaataacaacaaacatttataaagtttacaaaaattttaaaagagctctgatatccagtgttcaatgaggaagtaggaaaatagctttctactccacaatgttggaaatcaatttggcattactagtcaaattaaaaatcaactttaacttagccattagcctactaaaatactcacatatgtgcaaaaatacgtgtaaaaatgattgttatttctaaaagtgaccgatggaaataacctcaatcaatagaatggactggtatgcagtcacaaaattaaataaatattgacatggaaaaaatgtcaatttgaagttgttaagttttttaaaagcacatggaaaaaaattgcatacaatgtgatcctgtcttatattttatgtatgtggatgtgtgcacatgtgtgtatccacttctaaatgcattgtaaaagttctctataaataccaaagtattcattatactaccctcagttatttttatatgtgtgtgtttgtgtgtatgtgtgtatatatatatatatgcttattataccaaaatattatccacagagaagagaaattagaaaagagaaaaggtttcaatgaagaatgaagatggacttttacttttactctatatatttctataatttttgaatttttaaaataactatatattgtataatttataaaacgaaaataaatcaacaaaaattgtttccacaaatgaaaaaagttcataaaacaaaaatactatgtttgattaatatttaactgtcaaattaccatttatagattctggttactaccataatcaattaaaatcttgccactcaaagtgacgtccttggaccagcagcaacagcattacctgggggctacttagaaatgcagaatggcaggccccacctcagaccagcagaatttgaaatttaataagatctccaggtgattcttatgcacattcaagtttgtgaaacattcctctaagattttaagcattttgtcttctgcttcaatcactgacaaagaaactgcttaaaaagtaaaatacctcattgaatttattttttaatatataaaaaaatactggaaagtgtcttcaaatatcaaagataatatgtggagataatcctttcacaatattaaacaatatttttaaatgttcaaatgttaaacacaaaattagaatttttccataacttgggaagcaggacaactgagtaaaaaaaaaaaaaaaaaaattacatatcttaaaaagggcagggtgatctttgtagattgtaattttccctcttgcatctaaaaatcaatgtgtttctgctttctgaatgaaaagccaaccaagccccagatgtctggatttccccatccccaggtgaacttacacagtgcatcaagaaacaatatggagaagtagacacatggttcatactccattaccagacactttacagaaggttcagcttcctgctttcacacaaaaatcaaatttatccccttcacaccttcacaacctctcacataaatctcacccaaattcctacttagcattccccaaaggaagacgctccctggaccaggtgtgacttcacctctaattattctttactacatctgcatgtgattttcctcattatactgcgattacatgaggaaagggcctctgttgcctgagcaaccagaaccagcacgtgcacatgcctactgactgcaaccctacttgtagtttttctattatgcgcttgggtcctctcacttttatggtcaaaagaatgcaattctttccccggttctgccctttttcttcttttgtggccctgtctacagtgtctggctgatttgtctaatttctcttgaatgtattgcctcaaattctcttgtttccatcagcttagactgatgctttccatcctcctaatcagactctccctttgaattgctcctctgctgaagactgccgccccaatattttgcttaccttttacatgtgtctctctacaatattatattcaccataaaaaaagattcaatttgcaaagattccttgtctagccttatttccttcctttttcctcttgctgtagttattttgctactgaattacaaggctaatagaaaaattatgacctctattattataattcctggtagtaagtcacataaaaatattatatgcacaatctctttttttaaagtggtggttcttaactgtggctggatgttggaatattatgggtagctctaataaatactgatgcttgggttccatccccagaggttctgatgtaattagtctgcggtgctgcctgggcagggaattttcaaaacctccctggatgattctaacgtgcaaccaaagttgggaagcatgaaggctgatagcttttcaagctagcccttttccattttgttattccttggcatttatgatggtaaattacaaatgcaccctatccttaagggtcttatgccagtgttggcctatttgccctccaaaccattattctttccttgctgtgggtagtgcatttcagggggtaaatatccataggctctttcccaggctcacgagatagctggttccaaaagagcttcacccaatacccagtgggaggctcttccaggaacctggagggtgggagaaagggtggctcttcccctctctgtgcagtgcctctagctgtgtcctcctgtgtctccagctcctgccagacagactcactgcggcttcaatttcttaggcataacctggcccacagacttccttaacacagcactttcctttgatttccaattaagggctattagtagtttcctactgtatgtaaactctagggtatctcaccactccatttggcaactaactcagttcctccatcacctatatgaccaattcccagtaaattttcctctgtgtaaataccttagaattctttcgttttcatggtaaggccctgcttgacacagttttcagcctactgtctagtttcccagatgttgtatatctctgatgttccctccactagagcccactctgatcctcatgaatcagataccaccttaatgacaccaggtctatgtcacattgccagatacatacatcgcacattgacccaagatctgttgttcagagttactgccttaacagtggagatataagagaaacttccccttccagaaaaattacatatcactaatattatgttcagaagtagagtgatatatccctcaccagagcttggaatgggttctctaaggcctttttaatcccaaggagcatcaatatcaccccagagctttcagaaaaccagaatcctgagccccactctagatatgcatttttaaaaattgacatataagctaattcatactctataagatttatctacagttatgcattgctaaacaacagggatattgtattagtccattctcacactgctaataaagacatatcagagactgcgtaatttataaaggaaagaggtttaattgactcacagtttcgcatggctggggaggcctcaggaaacttacaatcccggtggaaagggaagcaaacacgcccttcttcacatggtggcaggagcaagaatgagagccgagagaagggggaagccacttgtaataaaatcatcagatctcatgagaattcactccctgtcacaagaacagaataggggaaaccacccccatgattcaattatcttcacctggtcccacctttgacatgtggggattattacaattcaacatgagattttgggtggggacacagccaaaccgtatcagatacatacacaaacctggatggcatagcctatatacctaggctataagcctattgcctttaagctacaaacctgtacaacatgttactatactctttaccgtatactgtaggcaattataacacaatggtaagtattagtgaatctaaatatagaaaagatacagtaaaaagatggtataaaaaacaaaacatggtacacttataaagggcacttactatgaatgaagcttgcaggactggaagtttgtctgagtgagtaaacaagagagtggtgagtgaatgtgaaggcctacaacattcctgtatatataccactgtagactttataaacactgaacaccaaggctacactgaacttatgaaaaatgtttttgtttctttaataataaattaaccttaacttagtgtaaactttatatattttagttttttaaaactttttgactctgtcataataacacttagcttaaaacaaacacatcatacaaaaatattttctttatacccttattctataagctttcttctatttttaaaattcatgtaaatttcatagaaatattattttaattgataaaagccaagtattatttcacctatatgaaatttacatgaatgtatataaaatgttcagaataggcaaatccatagagacaggagattggtggttgcctagggattagggaaggagcaaatgaggagtgactgctaatgggtccaggatttcttttttggagtgatgaaaatattctggaattaagtataatgatgatcatacaatacggtgaatatacaagaaactccactacatcgtacactttaaatacagtcataagttgcataacaaagttttgctcaatgacagactgtatacacaatgcatttgtttaatttgtttcattgtttcctaaaaccacattgcaagttaagagaatatattgtcatgactataaatgctttattgaatttgatcggttcctgtaattatgtatgaaaaacgagacttcacagcctttattcagaatcatactttatattgcttatgtctgactctgtaacagttcataaaattatatagcatgtttggatatgatgaaaatttagcattatctaacataaagccaaaagagagagctgttggagaaatctagtccaattcttttattattcagttgaagtaattgtaagttacaaatattaagtggtttgtccaaaatcagaaaggtaattggtgtcagatctggaaccagaaagtagaacagggtttaggaaacatattcattataaggtttaactgttgtaattattgctattattgaaaaaagaaaaaattgcattaaaatgaaatggataattgacaattatcgaaataattgtttcaaatgactcacttatctacataattcagacaaaagtcagcattgtagtttcctcctaattaaatagatatttaatactagttttccactgcatgaaaattaaaacagaaaagcctttagaatcttattgcttcctcttgtttaaaaacatttaattcattgcatttagtatttctatgatttattcatgttgaggcatgtatcagtactttaatcctttttatagctaatattctattttatggatataccacattttgtttgtttattcattaattgatgggcatttgggttgtttccctttttgactattatgaataatgctgctatgaacactcatatagaagtttctgtgtgaacatatgttttcaattttcttgggtatatatatacctgggggtgggaattgctagataatatgatagctctatgtttaaatttttgagaaactgcaagactgttttccaaaacgggtgcactattatacattcccatcagtgatgtctaagggttccatccacatcctcaccaacacctggtattgtccatgtttttgattctagccatcctcatgagtatgaagtaatatttcaatgtaactctgacttgcatttccctcatgactaataatgttgagattttttttcatgtgttattggtcatttatatgtttctttggataagtattcaactcttttattttttaattgagtcacttgtcttttattgatgagttgtaagagtcctttatatattctggatactataactttatcagatatatgatttgcgaatattttctcccaatctgtgggtttttacttcttgatagtattctttataacacaaaagttttttttaatgatgtcctatttatctattttctctttggttacttgtatttaggttttacatttaagaggtattatgcctaatccaaggtcacaaagacttactgctatgtttttggctaagaattttataattttaccttttatatttaggtctttggtccattttgagttaatttttttgtataagatgtgaggtagaggtcccactttattattttgcatgtagatatccagttgtccctgtatcatttactgaaaagactcttcttttccccattagatggtcttgaaacgttgttaaaattcaactgaccataggtgtattggtttatttctgtactcttagtagattccattgacctatatctctatccttatgccagtaccacagttttgtttactacagctttgtagtaaattttgaactctaaagtgttagttctctaactttgtttgtttttcaagagtgttttgactcttcttactgcatcccttgcatttccatatggactttataatcagccatgtcaacttctgcaagaaagacagctaggattttgataaggattgtgttgaatctgtagtccaattttgggaatactaccatgttaacatcgtcttcccatccatgcacgtgcaatagcttaccatttatttggtcttcctcaatttctgtcaacaatgatttgtagttttcagttgcaagtcttgcacttcttttgttaaactttttccaaatatttattcttcttaattacataattctcataattaataaaattctgaaattttcttaatttcatttttgtggccatgcactttaaaacttgccttttaacaagacttccagatgattcttgtgaacattaagtttgtgaagtgcttctctattgacaaactgaactcacgtgacattccacacagcactggcaaattctgtcccgtaactccgctagctctccaacaagaagtgacttgacgcagcccaaggttactacttaacacaatgaattaaatgtttttaaataagaggaagcaataagattctaaaggcttttctgttttaattttcatgcaatggaaaactggtattaaatatctatttaattaggaggaaactacaatgctgacttttgtctgaattatgtagataagtgattcatttgaaacaattattttgataattgtcaattatccatttcattttaatgcattttttattcttttttcaaaaatagcaacaattacaacagttaaaccttataatgaatatgtttcctaaaccctgttctactttctggttccagatctgacaccaattacctttctgattttggacaaaccacttaatatttgtaacttacaattacttcaactgaataataaaagaattggactagatttctccaacatctctctcttttggctttatgttagataatgctaaattttcatcatatccaaacatgctatataattttatgaactgttacagagtcagacataagcaatataaagtatgattctgaataaaggctgtgaagtctcgtttttcatacataattacaggaaccgatcaaattcaataaagcatttatagtcatgacaatatattctcttaacttgcaatgtggttttaggaaacaatgaaacaaattaaacaaatgcatgattccttaaattttgttgactcgggatttagttacatataagactcttttcccccagccagattaaccctgctctgtatatgtaatacgcatcttccccccaaatttcacaataataattttatgaaaatcagtatgtaagttgctgcattggcatgaaaggctactaatgtgatatctttcaaagataaagtgaacgtttttgtaaaaagccaccacactggaggcatttaacaatattcatcttcctatggcattactaccctagatgtactttgcaatattaatcaagccttgtcttacttcaggcttcctagaaatagagcacaaggcagggattctttcttgctcggtgatttattgaggaagtgctctcagaagaaattggtaagatgctaaggagaacagcaaaggacaggagaagggggctgagcagagatggggatctaactggaatctggcctttgctgattaccagagcagctctgggtgcgaatggtgaagtgctgttctattgacaaactccactcaagtgacattccatgcagcactgccaaattctgtcccataactctgctagctcttcaacaagaagtaacttgaggcagcacagttacagaaaacagcacaagaaccaaggatactaaacagtgacttaaatgtttttagataagaggaagcaatgagatactatagggttttaatttctgtgcaatggaaaactagtattaaatatttattaattaggaggaaacgacaatgctgacttctgtctgcattatagacaaaattgagttctccaaccatgaggcaaggtgctggctttttgtacccctgcactattcatttgatgggtgagtgcactgtaacttccagacgtctcttggtaggtgggccccactggccaagggcatttcccgggagagtgaacggctgtgagctactagcagtagcagtcacagcagctgggaggaaacacactggtcaggtaaagggccagcatctaccaaggtccagttccacaattagtggagaaatatttaataacattatttttgaaaataattaggccatatgactttgacactttttctctagcaaagtgactaaagagaagcaggtttttaactgggtttttatttctgttgtgtctctagccaaagccatgctgatgtttgatagtttttttttttctttttttaagagatggggtttcaccatgttggccatgctggtcgtgaactcctgacctcaatggcctcccaaactgttgggattacagacgtgagccaccacgcccagccagaattttttttcctaaagaatagaacaacattataaaattttaggcattaaggacaaattttattttatgattttcatttcggtgagtcacaagatattcaacacaaaatgaaacttcacaaaatttcacaaaatgaaaaattcatttcagattcaatatccacctccatcatccatattcattcttccaatgtctcaggccagaaatttggagtatgtggcttctccacctcacacaatttgccctaactttaatatatactcagaaattactggcttttcactgtttctatgattcccatgtgtaatatacaatactcaccatgcatacaataatacaataattctgtgtcacaaccacacctaaattggtaagtttataaggttataagctgagaggttttgctgatcttggctgagctcagctgggcaggtcttccggtcttggctggggttcactgacacacaagcagctgacagttggctgatctaggatggcctcagctgggatgacaggctgtttcctcaccttccagcaggcaagccagtcccaagaaagagaagggtgaaacatggaggccattaattgagcccatcgcatgaaacgcatctgtgacaccatcaccgtctgatatcaactctcacctggatgtttgcaatcgcctaacttttctcctttcattcactatgctgccttacaaacctattctccacaaatcagctagagcaaaccttttaaatcctaagtagaatgctaccattcctctgctcaaactactggagaggagatgccacagtctttactatggtcttcaagaccctatgggaggtagccctgtcttacaaccatagcctcctaccactgccccaacatgcacactgagttccggccacagcatctgcttcctctttattgatctgccaaggacatgaatgactcagaatctcaaacttattcttccctcagaatccactgagcctactccctctttttctcaaatggcaacttctcagagatgccttctctggctaacgtatatgtactaaaacctccatccagcactctatgtcatccttactatggtttatttttcttcatagcacctatcaattggtgaagtattaaatatgcatttttgtttgtatgcatctctctccccgcaccagtatgtgaactccaccagactggagagcgtgtttattttgttcactgctgtaactccagtgtctagaacagtgcctggcacacagtaggtgtttaataatgatttgttaagctaagccaatgaataaatattcttttgcccatgagatgatgttaaaaatttttcaattattcataactgcctgtaaggaatgaatgttagtgaattactgtgataccaatgaaagttaaatgatgcaatgaagattgggtggatcacaaggtcaggagtttgagaccatcctggccaatatggtgaaaccccgtctctactaaaaataccaaaattagctgggcatcgtggcaggaccctgtagtcccagctactcaggaggctgaggcaggagaatcgcttgaacccaggaggcggaggttgcagtgagccgagatcacgccactgcactccagcctggccgacagagtgagattctgtctccaaaaaaaaaaaaaaaaaagatgtaaatattattattgtttgccatcacccttatgtgctgtcttggctttatgtcgtgcttagatcttttccaggtgcaatttgaattgatgcaactaatggaaactacaacagaagttcatattgccctattgtattacactatttgactcatctttcagtatcaccaggtgcataaggaaaatttcaaaagtaaatcaagagaaagaaatatgatcgcagcttaacacaatgtaaatttattatttgtactttttgtctaaatggtttgcctaaaagactgaaagacattttatattagttagaatacttgaggataataacataaaaactttcctttccaacttgtttataaaaggaaatcttcactgttttgaacatcagttattttaaacttttaagttgttagcacagcaaaagcaacaaaattctaagtgcagtaatcactttactgcgtggtcatatgaaatcaaggcaatgttatgagtattactggaaagctggacagagtaacgggaaaagtgactaaaactatgcaaaactatgcaaaactaagcagattgtgtctctagagtatttcccatctcaagtttagttatttactaatttggcaacatctgacctatctttaattgtgagaaaataaacaaacacataagccaactctcagaatatggttatacataggtgtagcctatgactttgaatgtatttgtttgaatagcgtaaaacaaaataaaaataaaatcttgttacagtgcaagaaacggcagtcatcaaactaagatgaggcaagtgtcatgaagtatgaaaatatggtacctgaattctatttattagaaagtcttcactgagctgagcatgttttttttaacaaattcaattactgatttgaatatttattatacttaattattgcagccatgaaaagaggtgctggctgaggctgcatttaataaaaacatttaatcagcttgaggttagtaaaccatttaatttgttttttcatgaagatttaacttctagaataatttcatttatgtatttttaggtatagccctagattctggtctacatagtatacaaatcattttagaatgacactaggttatttcaactgcttttctacagaagtgttaaataagggagtaaagtgttggctttttccataattgaaataaatgcacaatgagcagtaacatcctgatttcactgctattttgtttaatcaacataatgatgtagatttactctgtatatatatggaagagtgaaagaaggttgggaaggaataactatcaattaatataggtgatatagtagttatttttgcaaatcaactataatttctgaatggatattcagaccatatttacattacatagaagaggcacacaccaaaagatttaacaaatgtgccaaatattggtgaatatttagttaggtaccaaaaggatgttgtataaattaggatgctttcaaccataagagactcatctcaaaaatggcttgaaaatgtggggaatttttatctcagtgtgaagttaaaggtagggcaagtccaaatcaattcaagttaattaaagccccaagttcttggaatttgctctgctagtcttagctggttagcctttgtcctgaagtttgtaacttcatgaccagaagatgatcgcaatattttctaagtataaagcctgaaggtgtaaaccaggtagtctcagcaaaaccaatgatgcatggtcacctttcccttagttgacaaatacttgccttccagatactttgaatcagaatgggcattttaactaagatccagtgcaactaaaggaataatcaaacaaatgataaaataattattctgagctgaaaacacaagtctgaatattggaagaggttcctgatttccaggcagaatagataagcaaagatatcaacctaaacacatcctggttatagtctaaaatttagagaataaatgggaaaagattatgaactttaaggaagaaataacaacttacacataaaacaaaaaggaaaaactatctgttgacagatttatcacctgctagataagagcagaataaccattcactaggagaaaatgggagaagctagaagatactggagtaatatttatagagtactgaagaaaaaacaaaaaacagaaattcaatacacagctaagatatcatttacctgtaaatgatacatggtaaaataaagggtaaaataaggatatttgcagattcacaaggagaagttagccttcacatactcagctgaggaaaatcctagagacaaaactctaacaaaaacaaactagccgggtgcagtggtgcaggcctgtagttccagctactcaagaggctgaagtaagaggatcactggagcccaggggttctgggctgtactgtgctatgctgatcaggtgtccacacttagctcgccatcaatatgatgacctcccaggtgggaaatggagcaggtgaaaactcccatgctgatcagtagtgggatcatgtctgtgaataatcactgcactccaactgggaaacatagcaagaccccatctctaaaaaacaaacaaacaaacaaacaaacaaacaaaaatgtttcagacaaatgtcaagatagagtaaaagaagaaagtactgaaggcccttcaacataaattggatcagataataaaaataatagcaaagttcttttcatgctgtatccttaattcttcaccataatcttaggaagtgaatgtattaattatcttttgctatataacaaattactcccaaaacttggcggcttaaaacaacaaatattatttcacaatttctgtgggtcaagaatttggaagtagtgactctggctcagggtctcatttaaggtggtagttcaggatgccagtcagggctgcaggcactgaggctgcttcctcaatggcccactcacatggctgttggctggaggcctctctttctcaccacacgggcctcttcataggactgcccgagtgtccttacagcgtggcagctggcttcccccagagtgaacattctgagagagagagaaagagagagttagaaggcatgctgtcacttccactgtatcccattcaccagaagtgagagactaaattcaccaaacagaaaagtgaaggagaatgaggctccagttttttgggtgagagttgaagaatgtatggatattttgaacaaccacaatataattcttcttttcacagaagcacaaaaaaatttatttaacttgtccaagtttacacagttagcaagcaacacctttgagaaaaaaatccatgtagtctgatacaagcacccaaactcataaccacaatgtgaatctaactgcttttcaattaaaaaagaaagaaagattcccttcaaatctggcatatgcattcacatggagcattcatactgccagtgacagtaccatagttatatggaattagaagttctaacttatcttggccaaactaaagacttagggctgggtagaaggttggagggatgtaaggtcattctcaagatctcatctaggagaagaaaacaaaatggggaagtagaagacaaaatgcttttttaggttgggaaaggactgggagaatcaagcatctagaaatgggcacaaagagttaccttattttatttaaaagaaaataaatgtttgactattaatgcctgagaacggaaggtgattattaatgagatgaaaaagttaatcagattctccaagttaggagggacttgaagaccaaattgataaaaataaaaaaaaagatgtcatagtagaataatctagataataagcaatcaatgagactgaaaaaataaaatcaagtatatcatttgttacactaaatattaatataccagattctctcattaaaaaaacagagaaagtcaaattggattaaataagaacaaaaagttagctatatagtatttatcagaaacattcttataaacaaattgataatgaaagattaaaaataagagatttgaggcaaggcaagcaaaaagaaataaatgttaaacaaggagaaattaaaggctacggacattacctaaggaaaaggatgacatagagttacagtggcaaaagttaggaagcagatgacataaatctatatgcacaaacagtatggccacaaaatacattaattaaaaattactagaaatataagatgactttgattaaaatacactgattacaagggatttaacatataaaaattaggctgatgtggtaaatttaaatataatcaaatatttaggaaaatagaacaacacaacaaagttgattacatatattcattttccagatagtatactttatgcctatgaaatagttcttaaaatcaattatatatggccgggtgcagtggcccacgcctgtaatcccagcactttgggaggccaaggcaggtggatcacgaggtcaggagatcgagaccatcctggctaacacagtgaaaccccgtctctactaaaaatacaaaaaaaaaaaaaattagctgggcgtggtggctggaacctgtagtcccagctactcgggaggctgaggcaggagaatggcgtgaacccaggaggcggagcttgcagtgagcagagattgcaccactgtactccagcctgggcgacagagtgagacaccgtctcaaaaaaaaaaaaatcaattatatatttaaacacacacacacacacacacacacacacacacacacacacacacaccttttctaaaaaatcgggatttaatagacatattatctgatcataggctgttgaagataaatgatttaaaggtggcctaaagtttaagtacttgcaaattaagaaacatcctctccacatcaaagagaaaatcacaactaatgttactaattttctaggaagcaatttaaagaacactaaatccaaaacctatgagacacagatgaaactgtgttcaggggagaatgtatagccttaaatgcttacattaataaagtaaatgaaagaaaaaaatagtttttatcctaggaaattaggaaaaaagcaaatgaagtgaaatatactactaagaaataaaggcaaaattactgaatttcatgaaatagaaaacaataaaatatattagaaaggataaaaaggattttaaaaatctgctcttttaaagaatctgtaaaacagaaagccttatggttcagattaaagaaaaaaagtttgtgtacgtgtgtgtgtatgtattaagaaaggagatataacttcacaatcaaagaagtttcaaagaattgcagttacatggcaataaatttgaaaactgagaggacacagaagattgtgtaacaaattacaaataatgaaaattgaccttattctgaagtagaaaacaggaatagatcaagtttcatgcaagagtttggaaagatgattaaaaatgtaccctctaaagagcaagctgggcatggtggctcatgcctgtagccctagctacatgggtggctgaggcagaaagatcacttgagcccagaagtccagaagttcaaggctacagtgagctatgattgtgccagtgccctccagaagagagaaagaaagagagagagagagagagagagagagagagagagagagagagagaagaaggaaggaaggaaggaagggcagaaagcagaccagaccagatttcatagctgtattctgtctatccttaaagaataaatagttccacttatattttaaatattctagacgacagaagaaggaggaaagttcttaggaaccgataagagaattcagaagaaccaagattcagtagcctacaaagaatgaaaatatgctcatagcaagacagcttttgagatatttatttcaaattcacaaaaactcccccatgcaatcttaaagaggctttactttatttaagccaaagaaaagtgcagatcctgatatgaatatatttatctacaaaaggctcatattctgaagtaatactattcaactctcattcattcaagagctgttctgtaattgttccaatataaaggagtcaaaacaatttcttaatggaagtattaagtagtgctctatgttgtcaactaatttatttcccatttcaaacattagttgacatgttttcatttctcttttggaaggaaacaactaaatatgttatcaatccatcatttacttgtacaataaataaagttctaaatcactgcacagtgtaaaatggcaaatagacttccccataacacaaagccatcctgaaaagttttgttcattttagaagaaaaaattttaaaacctgagcaccataggatatgaattttgtaaataattatgaaaagaaaacaacaataataaaactctactaatcttagctcgatcttataaaaagttccataatgagtaatcaaattttatttccaattaaatatgttatcacccagtagtatgccataccagtttctaattcatacttcaattatcttctaatttaaattaatgactataattgctgttataaaacaacagctctatagcctgctattcagaccagtaaataagagtttaagggcttgtgatagcaaatgaagtttcttattggattttaagaaaaatttttataaaaatatgtgaggttattcaatagaatcacatttaatttgccaagcattttgcagaatgcctaggactatgtaagaagtattaaatttgcaagccctttgaatagttgtaatttaaagataaaaattggtttaataccagacaaagatagaagcacaagttaggttattagagaatttagccagtgtatcagtttgtatcgtaagtcattggcaagaacaacgtgtacttttctgtcacctcccaactagctatgttttgagcagtaggaatatttaataccccttcctcccatttttcctttgtgttgtccaaattctgacaactctactgccagatagctcagggcaaaaatgataaagttcaagttaagaaggctctgcagtgttctcagttctcctctggtgaaagaggagaaaggttgtgtttaattatgaatctgggatttccaaaactttacccatgccctgcctgtcccctcattagcatgaagctgttatttaaatagttcagcaataacgactttagtagcctccctaggttaaaaagattgaaattaaatgtgtttatctattgttctactattcagttacctgattataaaatcaaagattatttcatgaaactcagtaccccttcagggaaaaaaaaaaaaaattccctaaaacaaagttaggagagtgaatcggaccacatgcttatctccaaggtctcaatcaaacagcaaatgcttacccaacttctattcaaaatatttgcgccagtagttctgatatgacccaagcagagttcacacattattaatctactcctttcagtcttctagatgtgtttcctccaaaatctaccagattctcaaataatttcaggaactttctccagaacagaaacaaggttgttactgataccaactttgtctccaaacatggggaagattatcattggaaagatctattgatgacctataatacatagttggaactgtttatccacagaagtattccccaagaatcaaccacagagccaagatggagcttatgtcattgttatgcatacttcttttacggcttgtgagggcagttcatactattctgattttacaactgagacccaaggaacctgagtgacttctaggctccattatgtcaaaaaaaactcaaatgtgaggctttgcctacactgagaaacagtagttcaagaaacggtgccctggttctgttaaaataatctgagagttatgtggtaagtagttgagagtgaatagggtagctttgagaggtgacagcgtgctggcagtcctcacagccctcgctggctccaggcgcctcctctgcctgggctcccactttggcggcacttgaggagcccttcagcccaccactgcactgtgggagcccctttctgggctggccaaggccggagccggctccctcagcttgcagggaggtgtggagggagaggcgcgagcggcaaccggggctgcgcacggcgtttgcgggccagctggagttctgggtgggcgtgggcttggcgggccccgcactcggagcagccggccagcccttccagccccaggcaatgagaggcttagcacccgggccagcagctgcggagggtgtactccgtcccccagcagtgccagctcacaggcgctgcgctcaatttctcaccgggccttagctgccttcgcgcggggggtgctcgggacctgcagcccgccatgcctgagctcccaccccctccatgggctcccgtgcgcccgagcctccccgatgagcaccaccccctgctccacggcgcccagtcccatcgaccacccaagagctgaggagtgcgggcgcacggcgcgggactggcaggcagctccacctgcagctctcgtgcgggattcactgggggaagccagctgggctcctgagtctggtggggacgtggagaacctttatgtctagctcagggattgtaaatacaccaatcggcactccgtatctagctcaaggtttgtaaacacaccaatcagcaccctgtgtctagcttagtgtttgtgaacgcaccaagccacactctgtatctagctactctggtggggctttggagaacctttgtgtccacactctgtagccagctaatctggtggggacatggagaacctttgggtgtagctcagggattgtaaacgcaccaatcagcgccctgtcaaaacagaggactcggctctaccaatcagcaggatgtgggtggggccagataagagcataaaagcaggctgcctgagccagcagtggcaacccgcttgggttcccttccacactgtggaaggtttgttctttcactgtttgcaataaatcttgctgctgctcactcttggggtccacactgcttttatgagctgtaacactcactgcgaaggtctgcagcttcactcctgaagccagcgagaccacgagcccaccaggaggaaccaacaactccagaagcgccgccttaagagctgtaacactcaccgtgaaggtctgcagcttcactcctgagccagcgagaccacgaacccaccagaaggaagaaactccgaacacatccgaacatcagaaggaacaaactccagatgcgccacattaagagctgtaacactcaccgcgagggtccctggcttcattcttgaagtcagtgagaccaagaacccaccaattttggacacagtttgacaataaatttacactcaaatatctctaaggaatcaaacttacagattaataattagtaatcaggtcacgtaaagtaaattataaaagagcattgataccaagattggcagaaagttttttgtgtgacaaaaccaagttttggctaagatacacactgctgatgggagtctaaattgctgtatatgtcgggaaaacaagttgtctttatcttgatgttataaataacctatgacccagaaatttaactcctagacatatactctagtgaaactcttgaacgtgtgcgtccaaagacatttataaacatgatcttagtagtattgcttttagtagcaaattctggaaacatcccaaatgtctatcaatagtggaattgatttgaaaggggtgtggaatggtaatataatggaatagcctacagctgtttagataaaggaactccaattaaacataccaacaaagatacatttcaaaaacaagacgttgaaaggaaaaaagtcatcaaaacaatacacaacattctaccacatttttataaattctcaaaatatgcaatattaaacatgcattatttagggaggcattcaatgtagcaatgcatttttaagaggctgggatgataaatgtaaaattcagaacaggtattatctctgggaacaggaagaggaggatgcagtgttgggaagaaatacatataagtacagcagtagaggcagacttttttttccttttcctttttcctttatttttcctagctttctttttctttagctatggtatttctttagctatggtatggtatggtatgtactttccatatatcatacagtatattttggtgtgcatgaaatagtccttaataacatttttattattttttatttgacgtttaagttcaggggtacatgtgcagatttgttatataggtaaacttgtgtcatgtggttttgttgcacaaattattttctcacccaggtattaagattagtacccattagttatttctcttgatcctctccctcctcccactctccaccttctaccctccaataggccccagtgtgtgctgttcccctctatgtgtccatgtgttctcatcacttagctctcactcataagtgagaacatgcagtattgggttttctgtttctgcgttagcttgccaaggataattgcctccagctccatattcctgcaaaagacataattttgttcctttatatggttgcatagtattccatggtgtatatgtaccgcattatctttagccagtctatcattgatgagcacttaggttgattccatgtcttcgctcttaacatttttaaacagtctctgagtagaatagggtaggctggtgtaaggaattactgtttttaattggaagcaattacatactgcattaaaaagcatatatatatagacacacatatatatgttttacattcacataatcaaaccaaagctttcagaattttccgccaaaaagcatgtgtggagggagagagaggggtgttatggtgcatttgtaggccctgaaataaagtgatctccatatttgcttccatttgtgtataaatattttttaagcatatatgcatcctagagtatggaaagaaaatttctgggaagatttgcaagaatctgtggcagttgagagtaggttcactttcgctttattgtgtaatttattgtatttttcatttaattgtactttgtaaactaaatatttattgtatattttacttcattttttaattgccatatgcagctttaattttataactaaattacgttctgacccagggcaggaggtgggagaagagaatgagagaagggcggaatcctcaagacagcagcattctgcgctccgccctggaacacccagcgcagctaccccatcccgcccaggccggccacctggcgtcgaagccaggcgcgaggggcggaggcggaggcgggggcgggggcggaggcggaggcggaggcggaggcggaggcggaggcggaggcggaggcggaggcgagcaccgccccaccgcgcacgctgcggttgccccggcagccgcgccctgcgtggcggaagctcacaatcagcccggtccctccggcttccaccccgccccctgcgctcacctgcccgcgcgctcgccttccggggacccggggcccatggacacatacacccagccctgctgtcccgcgcgccagctcaccagccctacccaagggacatcattcacgcctgggcgcctccgccgggctccgggagcccaaggtcgcggctgggccagcgctgagcgtcagaggacgagagcaggggcctccccggtcgccccagcaggcccaggcacataggtgcccagagatccctggcttctgatcgcccggaagactaagaggtgagcatgacacatggcttttcctttgacgttacatctctaccccctccactcctctcttctccagatttttctggagactaaaaagtggaaagcacagtagagaacccccaacatgtaaactatcgcttacacttgtgggtgagctgaaacccgcaaaagtttggtgtattcataaggagcctatattgaaggactttgctaaatgttttacaaggatcatatctcatttccttttcacacagtcccatgaagtgggcaccattgctattgccagttcacagatgcagaaactgaggtaaaaactaggtaggtagcatatccatatttatatccaactagtttgtgtaaataatgatacagggaagggaggatcacaacggatttccccacctcaaaccctacattccactgtaccaagcttgtcttcctccattcctctttctaatgatccttccttgtcgcacagcccccctttgagagttaaatgacctgaacacacacagattcccacagattttcatgtaatttccgagtattcagaccccgaacatggacctcaagtcaagacattctgctctattccactaccttggtagatggttagatgtgactaaggtggcccagggtcatgctggggaaaagtacaggtgtgcttgtatgtggaggatcctatatgctgctcaatttacaaggaacccaggacccaagggctacacttgtgtgatttcctgcagtggggtgagctcttggtcagtcttagcagttgattgtgaaggacactatacagggtgctgccctctccccagcacttcagggctttagctgggagggaggcagtccacaggaaaccgacccatggacctactgaattcatcactgtagctgctaattaattctccgttagagatgggtgctaacagaggcaacattgaagtccctgattgggaaatccttattttcacaaatcaagtggcattgattcagtctaatcattacctatgtaggagcatcttgccctattccatagatgacacatatacatatgcagtatgatgacaccgcacctaatcggaatatggccgataataataaaacaagccataaatagcagctaaggtgagtgtcaccaagccgtgcagcaaagtccaagtggatgactctgaggcagcctcagttggttccctagtccaccgcatgttataaacagattaaaaggcaaaggaggcctggcccggtggctcacgcctgtagtcccaacactttgggaggctgaggcgggtggatcacctgaggtcaagagttcaagatcagcctggccaacatggtgaaaccctgtctttactaaaaatacaaaaattagccaggtgtggtggtgggcacctgtaatcccagctactcgggaggctgaggcaggagaatcgcttgaacccaggaggtggaggttgcagtgagccgagattgtgccactacactccagcctgggtgacagagtgagagttgggctgagggtcgagggtcatgggatagggcgagacaccaggggagtgtgtgaggacagaaaagagtcttgaggacctagccctgggcacccaacataggcttcttgaaatggggagtcagcaaaggagcctgagcaggagggggcattggtgttggatggaagcaggcgatggagatgttgtggtgcctagagagacacatttaaaggagagagagctcactgccgtagagaatgtaggtgagggagcaggcttgcgatggagaaaaatggtgcatagtttcaacttttgtagtaagatggaatcttttcattgcaaatgttggaaacttagctaactagcttataccaaaataaggtgacgggggagaagatgtatttacccacaaagtggtagatggcttctggcaccatggaatccatgttgcaactaatgccatcaatctcagtctctctccatcctccaagcatggactctctctgtggcacccaagagagctacctgcgccccagccccacaccatactgcttaacaacttcagcagaatagtcttccctcatagttctggatgatgggctgctgattggttgatgtcttttatgcacatatgcttgagcttcagtgtacctggaaagggatggttccctcaaatgggccaagcctaggccacagacgctttcctctggcaggggacagaagggacagccccatccaaacgacccggataggattccctatgtgataatggagttcttttctcataagaaatgaagaaacaactggtcatacctagcatggcctgctactcaatccaaaagattttccgtacaaggaggtaaaattacatactagaatgcccatcacaatttaacagggagattgtttatgaagatttgcagtttccttgcagccatttaactacatcttttccacttaagatgacataggaatcactcatcacatctctgatatgttacagagcccagtagatttgtttataatgaacacctcaaaattatatgtttttataacaccttaaaactattaaaacctgcatgatctctctattttgctggtgtgaaaccatgtagatagatggtgggaactcaaacccttaccatggcaatttagttaacctcagcttcttcatggtaaaatggtaaagtgtgatgaggagggaaggttaaatggataataagaaaaccacctggcaaactatttttaattatgatggaagatttgtttgaactgttttaactttatgcccactcaatatttttgatatttatgtataaatcctactttctgaacatttcttaaaaaacaatctctgttcttaaggaagttccaaaatattgttatttaatcaaaatgaagatgataaaattaactttgagttatttttcttttttgttgcttcagctttagttttggtccagaaagcattttcaaggagctggtcaagcatggctttagcagataagagacttgagaacttacagatctacaaagttcttcaatgtgtgcggaacaaagacaagaagcagatagagaagctgaccaagcttggataccctgaactaatcaattatacagaacccattaatggacttagtgctttgcacttagcctcagtttccaatgatattgatatggtcagctttctccttgaccttggtgctcaccctgatgtgcaagaccgaatgggctgtactcccacaatgagggctgcagaactgggccatgaattgtcaatggaaatattagcaaaggcaaaggctgatatgactatagttgataatgaaggaaaaggtaaaaatcccgacatcctctccagcagattgcaattcattttgtagccagaaagcaataacatggactctttttgttttccaactttagaagtgaattacttatggttttaagggaaaggctaaattctcactcctatacctaaacctactgtctcctcatactttgaaaatgagatagctatatcttagggaaatcatttatgagagcttgctcatatacttagattaatttgtgtttggtggtttcttttaaatgaggagaattttgaacattatacacactgattattcattataaattataaactcttctttaaaacaaagatgaagtagagcatttcttattcttttttacattttagaatttcaggcagtactacacctaggactccaaaaggattttgaccccctcaatagcagtctgatgtaggaaggacttgcacttggaaacttgaaaggactaaagtcaattctggcataaactccaactttctaggatcatttaaaaatgtatttggaaatacaacttcaaactttagacatgacctttcaacaatgattcagatcaaacaactgcacttccacaccgttaatcccatcatctcaagaccatggtctgaggacttcttgcccaaataacttaaggttcaggcaagaattgacacagcctcataaaaataactgagataattaccaataagcttaatgtaaactgataggtttgagcagttgtcctgagtttctgcagatacaaggccattaacatcagctctgcaatcgagaaatgaatctcatttgataatgtgaatatttactgacaagagcaaaatctacttttctaactctctccagacttggtgtttgatatgattacttgcttagaacaaaagaggacaaagaaaagggataattacatatttaattgtaccacgtaagaaaataaacttcagatgcattcaggggccagatgtactttgaaatgctaaatcctgaaaaaacggtatcctctcaaagctctatagtataccatttcccaaagtgtgttccatggaccactgaattgccaggatgttgagaagtactacaggcaaaattggttccacggtcgcattcattagagacacattttaggcatttatctttcacattgttggctcaaaaatggtgacattttccatatttatttgaccacaaaataattttttttaatgacatcttatatgcctggagttttgtggactaacctttgggaaacactataatagagaaacgtttaacttactgagtttgaaacagatacaaatcacaaagaaaaaagaaattctatagtgtaacaatgtaaaagtgtaaattttttttaaaaaatcaaggtaaaattggaaacaaggtcaagtaaatacttgcagcaaatgcaacaggcatatggctaaaggaaacaaatctcatgggcagaactgaaactataaaaggaaacaaatgtaaaatcttgtttcacacataagcttgttaggatggctgcctgcagccctcactctgcataacccaaggtagtgcccattgtacagagtacattgtctcttcccacatcaacaaggctcactcagcttgcacatccctcagtttggctgccagtggccaaagtgctttgcttattccacagtaccctctctgtcattgacatcctattttctggtgactcatgtttgactcactgtacatcgttcctaaaggataagcaaacatttaaatggctaagtgggtctttaggatgtgagacatgccctaggcctaagcggcactttctcttggaacagttttacagaatatggagaaggtaaagctctaagccaatacattctttcttgtatgttgtcctagggaattaattacaatgtggaatcattctccttaaaagttaagctataatagttccttatagcacccattcccattccattggtttttgcatttacaggcatgtgtactcagtcctcaatgccgtatgccagttctatgataaggtacaatatttttcaaactgttttcccttcaatttaggaatgctgattcgtgttctttgtggcttaaggagtcagcccagatacactttaactgtgtgttgcacatgccatcattatgaaatattcatttcataagtggctctgggccttttgtaatgaattcagcctcctcgggtattatgcttaggttgttttgctgttgctgttgttgttttgctctgttcctgccttctatgtcttgctctttctttgactttctcttttcaataataaccttgacaatcttttctttttttttttaactgttctgagtaaccctactttaggtacatcagtttatataaaatatatttaggttttgattttcatatacattttattttttattttaatggtggaatttatccaatttatagttatctagatttcccatagggttggtttcagaaacatcatttattttatattgtgaaggcaaaatatatctaatatataaaatacatgtgaaagtattgtcatatatggtccatagatttgttttactttgctgtatatgtgtgtttttctttatatgcttgtaagtgtattttctaaaattgatgggctttttagttattttagtttttttatttttttttagttattttaatggttaacttgatacttcatatgcccttaaacctgtttattgagttagcatcttaaacagtattcattgattctttactctgtttagtaagattagtacaatagtataaattagataagattagtacaataacccttcctcttacctctgctacttcccttctaccactcaattttatactcaattataattacttagttctttcaatgattcccttttaaataataagtaccttgtactttatttccttacctgctttacataatatctcagtcttagccctaaaagatgagaagatcaaatacttatactatttctccttccttccctcaaatttttgataaattatattatttttacattattacaaattgcaatatatttttctctatctaaaattgctaaggtgacttagctttggttctgtggctaaagagattcagtatttatgactgttcttttagtcacatattctctattgatctcttggaaaactcacttttgccatcaagtagtttaagtcacttctttgggcttgtatccctgattacttatatccttaagactatacatgtctgttgtttttacatgaacaaagtcttgattgggtataaaagtttcctgttttttttccccaagttatagtgtagagatcctttgattatactgtagcattgaatgttgttgtgataaatttttgagggcagctggacttttccccttcatggattagttgaatttttgcctggattcttatgagacactttctttgcctagctttacctaggcatgccttgttgactgttcttaatcaacttttcctaagacccaacgtacccttttaatcttaagattcaggtctatctttgcactttcattttagaacaagttatatttagtttctttgctatcatggaaatgaattagccagtaattttcactggtatatcttttctagtatgtatcctttttgcgtggctttcagtatcagtttcctttttccttgcagtatttttttttaataggttgcatagtggtttcttttttggttattctttgaatggagtcccttttttggaatgaactcgttacaaagtcagtttggagtctgattgttatttacctaggactttcttagtaacactctgccctgggtttataacagtaaccctgatgtgtagtatgcttttgacatggattatattgaaggcctgtatgttacaggtcctgggtgtagggatttagcatgttcctttctccaacggaacaaaatgatttgctaaaatggcagaggcacttgccatctaattagccacttggcatctaattcacctctttactgctataccgacagcctgcttcttacaaacatggtcagtctacacatttcatcacccagtaccatctcttttgccattctgcagttttagaggggaccgggggacttaccagtagccctttggcacacatagctgtagcccttcacattccaagaagggacactcagggtacgtattgcaagatgccaaatactcagggtcaacagggttcacctatcagcgctccaattcttccataagccaggtcctatcatatgtggttgtgactgttttctaacgatgtcaggaattaagattttttgttttttgttttctgtcttggtgttttagttggtttcagagaggaaactgaggcagatatgcctttaactagctaaatatggatttttaataattttactttccttcctgtcaaatatgtatagatgttaaatactctctggggattttatttctctgcaggtgttttgttttactgcattttaccgactaagcggcattatcgctgtgctctgatcgcccttgaacatggtgcagatgtcaacaattctacctatgaaggaaagccaatattccttagagcttgtgaagatgcacatgatgttaaagatgtgtgcctgacatttttggaaaaaggagccaatcctaatgcaatcaactcagtatggctattcttgtgattacaaatatttcttgtttcaattacagcatagtataatcttttcatttaaatatgatgacattatcctgttagctgatagactgttcattttgattcaaaatgcttgaagatggtatacgtttattatcttcatattgctgtgattctacagtctgtttcctaattatgtttggaaacttggtatttattatgcataatgtcaaggtaccattataggaaatagtaaaaaaaggcattgctgatgcctaataggatttatcttcttagaaagaaaatatatagttctgctgtttcttttctttttcttttcctttttttttttttttttttttttggagacagcgtctcactctgttgcccaggttggagtgcagtggtccaatcttggctcactgcaacctctgcctctcaggttcaagcaattctcctgcctcagcctcccgagtagctgggattacaggtgcatgccaccatgccccgctaattattttttgtatttttagtagagacagggttttaccatgttggccaggctgatttcgaattcttggcctcaagtgatctgcccacctctgccttccaaagcgctgggattacaggcatgcccagcctagttctgttgttatatcaatttcgttcactctccttattttgagttttcttgtaattgccctttcttgacactaaacattgattttcttctcattataaaacacctatgacctaattttatattaggtgttgatattttatctctctttctccctttttattctgctctatttgcaagaaatacattttttagcatgatattctcacaggggcatgcagtgtgaccttgactctgattttagaattctacgttttggatactgacccattgtacttgcttaatttttcctctttgttacatgaagctaagaaaaatgtagagaactaaacttgtaagtgtaaagctaaggtcaaatggattcagactgtatttgtactgattctgctacttaatatgatgggtataaacagcatctcatattggactatttcatgtccagtccacaggccgcacagctttaatggaagcgtcaagagaaggggtagtggaaatagttcgaggcatattggaaagaggaggtgaagtgaatgcatttgacaacgacaggcatcacgctgctcattttgctgctaaaggaggctttttcgatgtaataatctattctttgctttaaaatttgttgctaaaacttttctgtcctttttctcaaatttttttatatgtcatatagagtacgctaaggcagacatttttctgagttacctatgttgttttcatcttgatttccccaaataattctaaaattatatttttaaaaacttcatctctttatttagttttatgtgtttgctaatttacttatttaatattattcatagtatttttctgtacactcgatgataacaatttaaaacttctgccacctgggactactgtattttatgacttcattacatactagagtcttcaaaatataatatgatctaattatgggagaacaatgccctcatactcttatctccatggtgtttgtgtgtattagataatgatatacctgaattttaaactcaagtattctgattatctaaacatacagcaaagaatatctcactgatacagtaacattgcagaaacaaaataaaaacactatttttttaaattctgaatttcatctgaaatttctttactcaatttctttgagttttaacatagttatcttcatttatatcactattttccgtgcaataaaagtatacacaaagatagaaaccacgtttggtaaagaattttccccttggatgctgttttccatgctctgatgctttcttaaattacctacactaacaaaaatggtagtgccccctctaagtatagagttttctatactctagatcgatgctatttaatagaacttttggtgatgatgggcatattctatgtttgtgctatacaacacagtacaacacaatggccatgtggcttttgagtactttaaatgtggctagtgaaacaaacaaatgaaacttaaatattttcagtttagttcatttcaatttgaattttcaatagtcatacgtggctaattgatattgtactggatagtgccggtctagctgtcagtctttatatagtaaatgtacattcctattcctccacaatatccactatttattttacagatattgaagcttctttttgcctacaatggagacgtggggctgatttcgataaatgggaacacaccacttcattatgctgccatgggtggttttgcagactgctgtaaatatatagctcagcgaggtaaaattgtctagcaattttgtgcttcaagtacttatgatttacccatgtcatagataagcagagaatttgggcctatcacttgtcagtggcttatttttttctatagcaaaacctcactcatatgtagaaagaaaattgaaaattatttcttatactaccctctgttaaatcatgaatctgcgcttaaaagtgatgaaaacccatttgtccaaaaattttaggttattgttaaaaacctaaaggggattgttcctgagccaactaattattcaaatacttatggttgagggcggggtgtggtggctcatgcctgtaatcccagcactttgggaggctgaagcaggtggatcacttgaggtcaggaggtcaacaccagcctggccaacaaggcaaaaccgcgcctctactaacaatgcaaaaaaaaattagccaggggtggtgacggcgcctgtaatcccagttacttgggaggctaaggcacaagaatcacttgaacctgggaggcaaaggttgcagtgatccaagatctgtgtctcaaaaaacaaacaaacaacaacaaaaaacttacagttgattaagttccttattttaaaaatgccaacatcaatctaaaaaaggacacacactggaaaccatttgctttcatttgaatttttagtttattttaaaaaatgttccattgtgtcaaatgcaaagataacttttctggataatttgcagttatggggaaaataatttgggggaaaacatgaaatgaaaattttcatggaaaatttgaaatgtaagcagaatttttaattttagattttcctgtagcttttaagtattaatttagaaatatgaactatatcatatatagcttaatgagtttcttaaaatgaaaatattaattatatttaaggatatgtattttttgttaattacatgctaattaaatgcacattaaaagctttttaactctgttagagatagaactgcattttgcagaactgtatatattttttctagtttatgagaaataggcaaaaacttaaagttcaccaactctataatagagcaaagaaagtgttttatttttctgtctttcacacagacacaaaattttagaagtcactaaaattataaataaaactaacatgcccgcataactataatagcataataacatccatttttacttgtatgaatgtatactttccctatgtccccagtgtgataaacccttttagcaaatgagaaaaaaatatatcaaatgcaattctggttctctcaaactgtcttaattggttttgttttcaaatctgtctctattagcagtttattctgacatttcagatttaacattatgtatttctaaaaactaaagatccactcaagttgagacgaatttctttaactttaatatgttgacttatttcttattgggacaaatatcacacatacgctatcatttatgtattcctggaataaagtcacagaaagcacattgagaagccaaggaccagagcctgggtcatgcaaaaaggcctaactcagtgatgcagaaaagatccattttcctagaagaatcaatcatgagactattttaaagcaaatgtttgaaaatgttctgagttctgtgcatgttcggaaatataaacacgtcaccagatcctatgtgggtgacccagtttcacagcagaagtgttgtcagttacatttctacctttagaatcttacatctaaggcaatcagagcaggaagaaacccttagtgatcaaatgcttgtttctgaataagctccctgggcttagtctcttctgtacttaattgtaaagcatttgtgctggctggattcatttctcacatttcctcatgatggtcctctttcgccccctcgtccccctgctggagcaattggcaactccctgtaagcatgtgagagccacatccaagggcagaggagaggagctcgtggagtcctcctcctcctcttcctgggccctcaactccctgagttctgcagcaccagccagctggaagttgaacaactttaccacagaggagcataagtctcacaaggaatgaatagatctttatttactaatcataaaggaggagacagaaagctccaagtcaaaacgacaggaaaactgcctttagctctttaaagtgggatgttggagtcttttatacacatggaagtttctaactaggattaagctggaagctgcagagggtaagctaaaacaggatgaaaatcctttggtccttagtgctgggtgaacatagaagaagaggcttgagaggtgggatcaaaaccccccagacaccctgagtaagcaaaataaatagctaagtaaaaacagcatatcagaattagtatggaattgcactatggaattactacgctatggaattacactatagagtcactgttcttaaaactatccaatatagaaattttataacctttattgtccccatagtcttttttagtttttctactactagtaaaattatcagccttagtataaaaatgtgtgtgtgtgtgtgtgtgtttgtgtagtaaaatagatttatttttctttttttactttttatttttttgatagtaagtatatatatttgtggagtatgttaaatgttttgatataggaataccatgcttaataatcacatcctctagaatggggtatccatcccctcaagcatttattctttgtgttacaaataatccaattacgctcttttagctatttaaaaacatacaattgttattgattgtagtcaccctgttgtgctatcaaatagtaggtgttattcattctttctatttttttacccatcgtatacaattttaatttttggcaatactaaggaaagtattaatcttgaaaaacatggtctgactgcttcttcaaagtcttacttatacatatacttattatagacaacacagcctttttggtagcactaaatggattccctaacatgttcaaaaaagtttatttctttggtgaatatttataaatgatgttggaatcatcattttgttaaataagggaccaaaaaggaaaatgaattttaatgtctaacttgcacataaatataatgctgaactcctcagatttaattacaattactttttcctctgtgaaggttgttcatatggccataccacaaaacagcagattagtataaattacattatttaatgaagaatacggaaaaaatatacttaaaattatacacagatttacagtttaaatcattcaaaaggaagtgggtattctgcatcttttcaggttcagatctgagttcataaggtcctaggtaagctgtttgaatccagcttctttccaaatttaaatgtatccttgctcttttcctgttggcctgaagtcccctgagcaagtgtaccaatatggtgtgtgtttcaaatatctctagggataaatgttctaatcctattgtaaattgtaaacgtatcttcttcagaattcaccaaagtgatgctcacagaaaaaaaaaatcacagctcaattttgtaattataacagcaaaatgtgcacatctctatatacatataatttggggacacattttttactaatcacgagaaattaagaaaacagttggatgagtgtcacttatagccatgcaaatgccttggcaccattcataattaatgatgctttatgttttaggatgtgacctgaaatggaagaatttagatcataaaacgcccagggctgtggctaaggaaggcggcttcaaagcagcaagcaaagaaatacgccgagcagagagaatcgctaataaactagccaggccaggagccaaaaatccaaatccactgtgggcccttagactgcacgattggtccgtagaacgtgaggctttcctccgggaagcctttgcggttttagacaggggtgatggaagcatcagcaagaacgacttcgtgatggtgttggaggaaaggcaggattatgcaagctcagaacagctggctgccatcgctcaccttcatgagaaaacccggggaggaggggtcaatattaatgaattctttaaaggaaccagatatttaaacaagtcttttgtcttaggatcgtatggacctaagaaaaaggaaaaagggatgggcaaaaaaggaaagaaagggaaatttgtcttaccccttccaatctgtgtcattcctgagtacgcgtttccacgccggcaggatggtgggccaccgtattacatgattgagacctacaagaatgtcactgatagcagccggtttaatagagatcatcccccagaacatcccattcaggatgactctgtttggtacattgatgattcagagaaggtattttcaaacattaatattatcaccaaagcaggggatctggcttctctgaaaaaggcctttgaatcaggaatacctgtggatatgaaggataattattacaaaactccgctaatgacggcgtgtgcaagtggaaacatagatgtggtcaagtttcttcttgaaaaagggtacgcgtctccgtcgggtgtggcctaaattttcacgagtcttcacatttcaaggaagtgaaaagatgaccgaattttagtaatatagaaaagtgctactttattaaagtctataataaggctttaatatataaaagccttttattaacaattaacttataggcttcattaaagaatgttattaaagaatgctttattaaaaatgctgatttattacaggctttattaaagtctaacaaatgccctataaaagtatgtgttcatattactgatggctagggttagaaaaggagaatttatgttagatttatgttatgttagattcctagcccctttattaaagcctataataaattaattaagcctatagatcttatatgggaaaccaggataatgggagcataggattgtgtgtgcacaaatatattttgccaatagcaattatgcatgaagtgaaggccagtaagtgtttactcagggtgaatagagtcttctgattattactggccttctatcagtggcagcacggctcagtcctgtctcagagcttcacctagatggtgtggagtcactttttaatctgcctctatttgaggatctcaacaacttcaaacaagtggaatggtggctataataacatgctttggtcccaaaacctgctgccctcctccagtgtggggcatccttttccttggtcatgtaaatatttttaaaatatcaaatcatgagagttttataatacttaactttttagactacaacaatcactcaggtttaattccttcttctaccatagttgtataacctgggtgagtttcttaatatttttgtgcctcagttctgtcatgtatgtaatgagactgtagtgggactcatgccacaagattagttgaagattagatgagttaaaatatgtaaagctcttgttaacacagtagttacatacttgagaaataaagtactaatcttattagtactttaatgttaaagaaagactcaaatttgtatattatcaagagagcaactaatgagaatatgaacttctggacagtgaatttctaaaaaggactaaaatgttaaataatacatggtaatatttataatttattaatgaagtttcatttaaaaatgtattacatgcagagaaagtcacaaaatgaaatatgtcctgtcagcttttatcttcattggatctgattttataattttccttgattttaacctttgcaaatcgtaatccctagaatctaaagtgccttttaatgtagatatacacaaagaaagttaagactgtcaaataatgcagaacaaagaggtttgaagaaaaattatggcacaaagtttacaatttagcaacttgatagaactctatgaaatcttactttgcatttttagtgtccagtcattggaaaaccgtatttttagtttgttcatctatcttattttacagagctaacgttaatgcaacagataactttctgtggactccacttcattttgcatgccatgcaggccaacaagacattgttgagcttcttgttgaatctggagctttaatagatgcagcttcaatcaacaactcaactcctttaaatagagccattgaaagctgcagactggatacagtaaaatacctacttgatattggtgctaaattccagctggaaaatagaaaaggtatgcgttcatattattgatgattagggttagaaaaggagaacttatgttagattctaagccccttctgattctattctcgtaggcttgcattgtccactgggttcctggtacaaacacaagcctgagttaaatgttatggaagtttatcttataccaagtgcttctccactcattggtgttggagggccaattctttatgtttataatctttcatggactgaaatacttttgtaaaatataataaaattatttattagaaaaataaaatgaaaaaaatacaaggccaaaactttgtttttaatctttaaattttaatgacagaaaattatattaagttgctaaaaacatttataaatacttagtttctgtagttacttcattatggatcagtaactattagtctgtggacttgcaccagtttgcagatgacactgagttattacactgttatgactgttaattactaataattgcataccctatagactttgggtttctcttaaagctggacaaagcaattcctgaattgaggcttccctgactctaggaagtaaacacacaacctaccttgtatcataaataccatacaggaaaaattaaaaaatcatttgaatatatttgagctccttgtttggaagtaccattttcctacattggaagccattgcttcctttgactgaggagcatcatacctctggttggttcaggctgcctctgagtcacagatactactgcacctgtcctgcctgatgatattataggtaacatattgcccagccatctgcctggagcacctgtggccactagcttccccagaccttttggaatttacctccttacatcaaggaaaggggaagataatgtaaaattatctatcacatagaaggaaatttgcacaatgtggggagagaataatcaatttgatatttaagatgtaatataatatttcctatcactcttttaagaaacatagtaaaaaaaaaactaaggaaaagtaattttctgtatttagatggcactataaatcatgggatcttaaagctgggaccgccatagagaaaatctgatctagctctgtgaacttctgtatatataccccttgctttaggaatcacccttattagggcaggcttagagctgatgtgctgagatatttttctacatggtttatcattaatatgtttatagtcactctgaatttatgtttatgtttcaacagggcatagtgccatggacgttgcaaaggcatatgctgattatagaataattgatctgattaaagaaaagctagataacttgccgaaaccagcagaaaatcaaaaactaaaaggcaagacacctcctatactgaagactgaaggccctgaaattaagaaagaagaggtaagaaaaatggttgactacccattagtaactggaactctttaaaaatctgtttgggggaaggcagaagcactatttacatattgttatacaacatgggtaagataatatgcagtgcatactttcaatagcattattatatagtacttttaaagaaatatctaataaaattcttatcactgaagagcctaaaaagtactcactgcaaagagaatccatacaaaaaccaaatgggttcagccaaatacaattagaatgttgaaaaagaaaaccaaaactggtgttggatttgtatatatttggtcctgaattatacagatttgatgagatggtccaaatagggaaggagattaacccttatgaggagtgaagtaaagcatgatttttcttcattttggtctcattaccaccatatcccctttcattgcccaccacttccccttcctcccacctgccgcctccaccaaggaattttaatgaataccactgaattctgggatacggagccattgtctctagaatatcctgcaaaatggttgtaggttttcaacgtttctggtaatccggagtgatttggaacttctaaactgcagtggaaggttgaagttgttgcccatgggagttactgagacatcaagactttatcattagcaggaaacccctaagtgtgtctctagattggaagcttttcttaagggagcagaatatctactggagactcttggctgacacaggacaagagatgaaagtcaagaaggaaaagttttagtgtcatcaaattggaaagcattggggaaatgtaggtggtagggagtagataggatgaagggattgtagacagacagcagacttataaacatggaggatgttagaatggcaaaaggtgaaggaggatcagtcaactaaagttcttccattgtcattttagtaggccacagatcaaggatgggtatctcaaagacttacgtgatcttctaccaatacttctaattaaagttaaacaaggcaaactatctctccccatccccaaagttataataatatactattttatctcaaattataacttgtacagtagcatttttaggtttctttctggcttcagagtaagatgtgaaacagcaaataatattagaaaatcagtatagatttttacaatttataatttttttgttcttgtttccaggaactgctgtcatcaatttatggtgtaccaaccacatcagagggaaagaaagtacagaagggtaatgtggttcatctgaattcattgattaccagtggttatactaagaaagtggatatcacatttattccacggagggtaagtgcttcgaaaagatcttcatagcatggtagaagctcataatgtcattttttcaaaagctttttatgtagaatatccaaacaaatctgcacagtttgtctttcatagttactacttgtgaatgttcttttgccaggttctggtactttcaactcagtatgcccaagtgatagctcccggcatctagttctctttctattactatttctgtattgagatttacattttcctagaaaggttgaagtctttctgaatcaatggcatgatctgcagctgtttaatcactaactcctaaggatacttttttttggtacttctcagacccaacccttctttgtacttaactactaccagctcatgcaggagtttcatataaatcaagactggatttattcagtagcttccgaaaacctccacaactaaagaggtggagacatcttttggagaaaagagttgtctttccattggccatccaaccaggctgaacaagcagctcccctcgccttctattataaaaataattttgacttctacataagacatataggtagtaaacctagatgatcttctaattcctttgcttccctgttttggcatcctaaaaaacgcacagcagctggtctgagcataactggccagagaagtaactgaataatatttccgacattatttgtctagacagtcatcatcaaaaacagtgatgctcgtgcaaccactagtgtcatatgagagggggggaagaagttaaaacacatctaaaagtaaatttaatagttttaagttaaaactataaacaaatttttaagttaaaactgtgtattgaaaattgtctggatattagcatatttactggctgtcatactcatacctgctggggtatggctatttttctttttaagatttggagtcctgaagccacaacagcagagctgatcaggaagagggaactacggcgagagaggtttacacatgaggtggacttcgacgattttatgatgccttttcagaagaacatcacagagaaagctcgagcactggaagctgccttgaagacctaagtcatagcagttatttcttggggtaaatgctttgaggcccagggaccaatctttggagaaagtagatatttccatcaaagccaaagcaatccatacaccaagaacttgttaccaagaatttctttttgctttaacaactataaatattcttagctgtctagagaaaagatgtatgttattttgaaatgaatggtatgtcattctggataaatccccaagcccctttatgaatgtagtgaaatacatggcatgtgggttataaacgttgctgtcaaaagatttaccaggtctacaccattatgcttattatttttttaattatcctttttatttattaaatagagacagagtctcactatattgccccagctggtctcgaactcttgagctcaggcagtcctcccaacttggccgtcgaaagtgctgggattataggcatgagctactgtgcccagcctgcttattgaagatacatttctagtggaaattgatgaaacaatttaggttttggaaaaagaagtaatatttaatcttttaaggaaggagtttatttctcacatgccattataaactatgtgtattagataccttgggttgaatacacttttaacagccctagatcgatagccctagccctagatagatagccctagccctagatagatagctattaggttggtgcaaaagtaattgtggtttttgccataacctttaattgcagcaaaaaccgcaattacttttgctccaacctgacagctaggtatctagctagctagaaaggcagatagacagatatatagatgatagatagatagatgatagatagatagatagatgatagatagatagatagatagatagatagatagatagatagagatttattgcaaataattggtttacataattttgggccccagatggttaagtgctaaatttgtagggtaggctatcaggaagtgcaggctggaaacatgcaggagctgtccctgaagtccacaagtggaatttcttcttcatcatggaaacctcagttttgttcatacacctaaatacttcagtatgtctttcctaaaataaaaggcatccatttacctaaccagattacgattgtgaaaatttcaactgttgttaaagcgactgatgggatcagtttcacctagattatctaaagcagtctcctttacataaagtcaatgaattgtaaatattggttgcatgtacacaattccttcaccacaacacctaagattagtatttgattgagttactgggtgctacaacctagccaagttgagtcataaaactgaccatctctggaggtgtactctgcagtaaaaagctagctgaggcattattcacaccaagaaatgcagtgggtaccgaacaggagctccaaaaatatccaacgtctcattgacagaaagaagccactttagaatctgccttaccagaaggcaccaattgcagattacagctctgtcagtcacgtatggattaaacccctttcctctaacctcctccctctctttccaaccttggagggaccttccacaggagccagttagggaggagaagggaagagagagaatgaagcaggtaaccaggcccacccctctggaggagacagacctgaacaggggttgcttacaagcattgcatttggatcccaagatttgctattacaactaaattttgtctgttttgtaaggttttggttggtttttttgttctctcttttctttttgttttgacataatttcatatttatggaaaagttgcaataatttgacaaagaattcttatatgccctttacccagattacctaaatgttaaccacttaccacatttgctctatctctttctccctctacatatatgcatatgtatgtttaatttttgtccccgaactatctgtgtgtccgttgaagacatgatgaagacatgatgttcttcacatgatgttttcatatttgtgtgtcagttgaagacatgatgttttaaatatttcattgtgtatttcctaaaatcacgatgttcttttgcataacaatattaccattggcaaactaaggaaattaacacttaagtgaactatttaatctatagaccttattcagattttgctatttatcccaataatttcctttgtactcccaggtcatgaaatacattcgcttgccccatctctttagtctcttttagtttagaacaacctgtatttcttgtttgtttgtttgtttgtttgtttatgacagtatataagaagaacacaagccacttttatcttgtaaaatgtctctcaactttggtttgtcttaaatgtcttcaagaatagattcaggtgatgcttttggggcagcagtgctacagatgtcattgcacccttctcagtacatcatatcaggaggcacatgatgttgatacctgatataaactttaactgcatttgcagttgagagaaatgtaaataaaagtaaagctgcagtaataaatcataactgcataaaattaactgtagtacatactgtacaactgtaataatttcatagccacctcctgttgctattgtgttgagttcaattgttgtcttttctcaagcttactttattgcacaaatacagtatttataacatacaaaatacgtgttaattgattatgctatgggtaaggcttttggtcaacagtaagttattagtatctaagttttttgggaggcaaaacttatacatggatttttttattgtaaggagagttggtgccggtaactctctagtagttttccttgtacttaatgaatatctgatagatagatactttgaaactatggaaatttccttctactttcatactttcacctactaattttagcatccatggatgattctcgcctaaaataattattacagtgacagttgccataaaataatttctacattttatcattctttccatttcttacttggccttctgctgttgggcagagctttcttttcttccttattaatttatgtactcaaatcagtacagactcatgcattccctttttatttaatgcgaattatatatgtgtggggaccaactcagaactccagagttggtataaagattattttaagccaaagacatttgagatttaacataccatatgcaggggaaaaaaaagtcttctcagacctttgcttatctgactacaagcagtaacttctaggaaataaggctgccataaattcctcttcaggtttgatctacttctagaacacaagtaatcctaccccaaatcccttctccagaagtgttgtatggccccgaaggaaatttaaggaccatttatacctgtatagataaacattatcacgtacttttttatctcctgtttgttcacctgaaaactcatgtatctttgtaaaaagtcattgtgtttacataaatgtcttctccccctcccctttgcttatcaagatgattataagccaccgattttaactatccctttcagttactcatcactgagttctcccaagtgtatatgccttgcatgcataaacttgttttctcctgttaaaatgccttttgtcagtttaattcacaggctccaggcattgaacctaagagggtagaggaaaagttaatcctcccctatgtgatcctttactctcattattaattttgatgctcaaattgtccctgatttaactaggggaaaacccttcaagttggctcctgataaaaagacattttgttttctaaaacaatcagaggactctttatttcttgaatgtgagggaaaatgcctacctttggcttcgttcaggaacaaggaaaatgaatctgcaacagcagattttcagaggtgatcactttctgttttcactctagtgagtacattttttaaatgtcagtttgatagatagtggtgtcctgggatcaccttcagccacttgcaaatataaactgagagtaagcattaatgttaggtcctattaactctctttccccacatacggagtgtttgtattcattttaatggctcaacatgtttaaaggggaattgtgtgaggggaacagtcacacaattgactgagtttatttggagtttaatgctaaacccaaacatagcatagccacagttctaacaatggcccataagaacatcagtgctattcaaagagtgatccacaggccagcagcatcacagggagcttgctcccactacctgccgcccaaaattatggtactgaagtctatatgagcgtaacgaaaattttgtagaggaaatcttactggcataaaaagactgtcaatgttgcatgtaaagtacctacattataagtagtataatatcagacttgcaaatgcacaacatgtacataaatagtaatttttctgggtctttatgagttatctgacctttattgttttattttggcttacctgtattttctgtttttctttttcttttcttttttttacaatgtacacgtattactttggaattaacaatttttttttaaaaaagaaaaaacacaagttaacaccaaagtccataataccaaagtgagtttattagtatttgcctcttttatgcctttttgtgcattgcattaagattctctcagaagaacggagccaagagttcaggagcaaatgatgtgtgaaggaagtgctcccaggggagagcagtatggggtgaggggtatgaaacaggacacggaaatgaaaggagccaaacaagggtgcgctttcagatgaaaccacagcttctgagtagcccgtggggagctgtagcgcacaggcaaggagctgggcttctgggttcctgtatcagtgagcagctgcaggattgagggtgtactggcgaggctgttccagtgctcgagggcaagtctgcaaaggtcatggtgggaactattggctagaaagcatgcagaagctgtaactgcgtgcatagcacaggaaagggaacacatgcacttatctttaaatttacacttcggtgaactgggtaagactgtgggttttatattagcagacctggatttgaatctgcatattgttagtcatctgcatttactgcctgcttgcctatggatcaagttatgaagggtcatgactccgaatttcatcatttataaagtagggataataatacgtccctcaatgaactcttatgagactctagtggaataatgtctttaaggatgctcagtctgtgcccatgcctggttggtggtcaacatatggtttgtttttaaccatcttatagtctctatctgaaaagtgaaccaaaagaaggcacaggaaggaataaggacccagacctgaacagtcagaacagaaaaggcttcctggagcagattcactttcagaccatcgaagtcatttaaacatatgtgtgtgtgtgtgtgtgtgtgtgtgcatgtgtgtgtgcgtgtatatatatatatttttttttgagacagggtctcatggagcgcagtagcatgatctcagttcattgcaacctccacctcctgggttcaagagattctcctgcctcagcctaccgattttttgtatttttagtagagatggggtttcaccatgttggccaggctggtctcgaactcctgacctcaagtgatcctcctgtttctgcctcccaaaatactgggattacaggtgtgagccatcgcacctggccctaaacatgtagatattttatctacatatttatctactttatccagtttctgataatcagagaaaaatgaaaaatccctatttgccatgagatatacttactaatttcagtatagttcctgtggatagtggcccaaaggttatctaggtaattactagttaggtagttaaaataatgtcttagatcaagcttcctagaaatagaagctgagatggggactctagtgcaagtgacttattaagaaggaacatgtcagggaatgagagaagcagaataaagcagggaaagatctgagggaaggttgtgatctcaggagggcattagcaccagcctaatttcctggagagctttggaggatgaatggaaccacagaggtttgtcctgcccagagggaagaagcctgcctgttacatcctgcatcaatcagtcattaaccagccccttgtcaggagagaaacctttcaagtgtcacctggctgattcgcaaggtggctctgatcagccaaaggcaatccccagagaagtgggtagcacttagcctccaaccacagcagctgagcactgggtgggccagctggttaaggggatctgggcagcgtaccaacagcatctgctacaaatggcatgctcttgtgtgcaaagttcaggtgcaaaatttcagatggtgactccttgagatcactttgcatgacacactttgtttttaaaaagaatattaacttcaacaaacttctgaacttgcctcattgttaagaataaagatgaatgagcaagaacagcattgataactgatttggcagctagttgaaaggggaatcacaacttgagtgttaccaactttagtgttatcaatggttaaaaatgataaacatgagagacagaaagatgtactcagccttatgctcaggataaggtaatgtctaattggtacaaatcaatcatccccagtgaagttagtttagcaacttttattaaagtcacaatgtagccgtgaaaagtgcccaaaagaactactgagcctgtactttttttcaaaacgggtggtgtaaaaagagagaaatgggaaaattcaaatgccttctccacactggcataaatttgaagtaaacagtcatctgaactatggtattattaactatttacacagtatgtatatttcattatatggatttgtatttctgtaacaatgcatcctaggggaagtttacaaatgaaggtagatggggtgtttgtgtatatcaaataaccatgtgctaatattcatagatccttaggtaattattactacatcatgaattttatctgagtaataaggaagaactgaatattctgttgagattctggaacttactggagatttcttttatcctagataaataattgagtattgtgtgatgtatgatgtgatacgtgtgtgtaggtatgtgtttattcaggattaatgatggtattttccttttatcttcagtaaataagactttgaagaggaattaatatgcaaaaaaagatttatttttcataggcttaatgactttttgtaagatggtttgaaatagccatatatttttctaaatgtgggagattgttatgttgttcattattgagactcgcaggctgcagttcgatgctttcctctgaaaagcattagaagtgagaaaaataagtgagagaaataagtattccctcataaaaattaaataatgaaattaacacataaagaattaaatgagcaatgagtattattgatgtctgaatatatctcacactaaagcaacacttcccaacacttcccaaagctaacaagtcagccagaaggagaattgatcagcaatagaaaatcatggaatgagagtacctaggcagaccttgtgtgttcagactctgcagacctctggtccatataacacatgcgtctcagttagagattgagacttttcatgatgtccaaggttgctactgccagaatgctgaatctatcagcagcccttgttctacatacaatttggttttattcattcagcatatatttattgagcaccgataatgaaaatcctaggtctgttccttgctctcttcatggtgcatgacaggagagcaattcatccagtttgcatgtcccaggtttctgcattatttggcttccagtaggatccagacaacaggagacaacaaaagatgagagagggaggagaggaaaagccaggtagttccccctttccatctttgcctttgtcggcatccccgtcaacagctgtgtctgtctcccccatgactccactccccactgtgtggggagctgtgtatcctgctgtggtcctagcctccctcatgtgaccctggcccctaggctctggtagtactacccactccctctgtcccttaagcctccaagggtggtaccagcttcttttgttgttagtctcagggctgcctcactgtgctctggttgtttcctcagcctcttctattgcttgtgcaaccaaatcctcccattaacttccattctgtaggaactcagagttgtttctgctttcccatgtggatcctgattaatcacgtatcaagcacaatggcatgtctggataaaatggaatgcaaaaccaggaatagcccctgccctcatggagtttatagtttcgtaggaaaagcatattttcatagaataatcctaaaatacttatgagatgattgcacaagattgaataattgaagattatcaaaagactcacaagatttcacagtgtgtatttgagtaaggttttaatacaggtgaaggatacattaggacacagagcacagatgatcacagaggggtctagggcttccaggcacagccccccagggtccattttaatcactcggtacaggacacattttatcttcagattatatacgatcaccgtaagtgtgagtccaggtatataatttattgaggggtctttcatacccaccagccatgtagctaaacccaggctgtataccctgttagaccaggtacaaactatcagtctatacagtcctaaacaatgtagacaagctaatacaggctgcctccaggggaatttcgagctttaaatagcacattgcacattataaagtcctcagtagcacatttcattcttaccttgaccagacttcaagcatcccaggagacaaacagagggctaccccaggatagctgcaaggtaacgctaccttatacaacatatgaacttatagtggtgctacagaataggggaaattttcactaatgaaatggtattttagctgaactctaaagaatgagtgaggaattaagttgacccagagggaagagaggaattgagtagaagcagcagcattttgcagtgcagacccattccagcaagtgaaataaaagcaatgtgacaagaaataaataaaaaatggtcagggaaaagaggccaaagccacatcctggagagatttgtaagacaaccatatggatttggaaagtgatggatttccatttgattctgctgattcgtcccttgtcctagaaattttcttgactttagcaacaccacagtttcctggtgcttctcaatatcctttgtagccatgctttttgcatcaggactctcaacaccagcagacaataacaagagaattattaagacttagaaaaagagaattcttaatacagaatttcaaggggtggattgagcaagactggaggcaaaacatcttccctgaaaaccatttctctcttccttgcttgctgacattctcactgtctggctcccttgctctctctacttggctttagtctgtgtgagctccaaccttagctagaatgtagcaaagatgtccaccagaagctccagggttacatcctagaactccaagtgaaatgaggtactctttcccagctggtcctgtgaaaaccctgatcgcactctcaatggtcaggcttgagtcaagggtctttctccacaccagtcattatacaacaggacacaagattctgattggccagatcattttgtcagcccatgactcagggaatgagtcactctacccaaaacaccagactgctacttgtataggtgtgggctcccaagaaaaagtagggattattcttccccaaaaaaagagttagggatgctggaaaggcagaaagaaaagggaagggaagaggaaggggaaaaggaaagaaaaaaaagaaagaaagaaagagaaagaaagagaaagagaaagaaagaggaaagagagaaagagaaagagaaggaaagagaaagaaagagaaggaaagagagaaagagaaagagaaagagagagaaagaaaggaaggaaggaagaaaaatgaagggaggaaggaaaaaggagacaggaaggaagaaagaaaaagaagaaaaaagagaggggaagaaaagaaaggaataaagaaagaagagaaagatggagaagaaaacaaaccaaaaaagtggctactacaacctccgcctgaccattaaatgtcggaatttctcaagactcagtttcaaaccttcatctcacactacgagctctccctaggcaagctcatttgcactctctccttggaatgactcccacatttgtgtcttaagcgtagttatttcatctaagcctacagaaacatatctaattatacttgacatcagttcttgaatttacaaacgctcctgaaactcaacaattcccaaatcaaactttagacctctactgcccatccttaagtctagtttacttcgagtgttttctagttcagtaatggaaccaccaacattctgctatgaaagccaaactcccagatatcatcatgacttgcttccccaagcacccacccaccccaattcaactccatttaatctcataaattcttgtgactcttcctcctactatctccacccttaccgccgtagtctaccttatcatcttacccagaaaactgtaagaaatattctgatctgttcttttatctccttctgtcctgcagtctatctatacattgatgccagacaagtcttttcaaggatgaaaagtgattacttcagtactctacctaccatctaattaaaatactttcaaaattactgattttcttaataatataagaaaatgtatgtgaacatggcctatgatcacctgagcggtctgagcatacttactcctcccccagatcaggcctttaaacactctgctgtagacagtctgttattttattttatgtacatgctcccaccttccattaagtttttgcataaactgtatcctccttgtccaggaattcattctccctcctcttccccaatacctcatctgcttaattttccattcctttttcatctcagagaaatcatctctttgttagggcagacttcctcaccttcctcacgaagttaaattctcttcctatatacattcatagatcacaatgcaccttccttcacggcacttaccgcagttgcaactatatcttcacctgtgcaattatttgaataatatttaattatttgacaccataactgtcatgactgaacattccaaaatataccacatattttctggccacattgatgggattataacataatataaacttgaattattttaaaatttgtgcacaactgaaaatcacgtatgtactttctcagtgcctctttatgtggagagtttatcttatactaattcatccctgactattgtactcctgagttcctgcctctgttctttagaatggtttctattttttttctgctggactgtattagcctttccttttgccactgggaacatagctgtttgtagctatcccaggtgtataagtaacctaaatggctgcttataatttctgcccactaggagagggactcctttactccattagtctcctgtttgaatcttaactctgccccaggcttcaggatacataaacactgccaatcattcttaagaagtgaagggattgcaaataagcaaagaaaaagtaattttaaacattctttccaaatgaccttgcaagagttttttccatttttagagggaatagtgggagtcagaattggcagaataaaagcagcgtattcctagaccatatatcagcagataaatgtgttctgcagcattaaaattacccttgtggtgctcattcctggatgtaccatgtgttctgtgatgtaaatcagtacatagccttatattttcctctgtgtcatggacccacagaattgcagtagcatgaactggttggcaacaaaattctttccagtgcttcataaagcctttggcttttcttcatttgatatgtgtgagtaggaatgcacaaaaaacaagaacagatgatattatttaaaccgtttggtaagaaatgtctgacaggaaaaaagaaaacatatgtatcgattcaagtgcagtaattcgcttggcggttttctatattatcctttctacttgtaaaaatcatctccaatgcagcaaaatgttcttaaatcctttatacttcattctaaaaatcaatagtccaaagatgttaactctttttgggcttttggaaaacaaaacaaaaaccagaaaagagaggataaatgttttcatttttatctaaatttttctggttgtttctggtttttccgtctccacttcattattactaacatggaattattgataaagcttaaaagaagagaaacacaaattcagactttaggaactcacttgaaatccttacttaaagactaaaagtcattcatttattcatttcattcaataaatactaaggatctactattttccagttggcctctttggcactggtgtataatgctacacgcagcactcactgctcccttggttcctgccaccataatagggagatagcaattaaataaacacagctatattattataaattgggatgcatgttaccatggaaaagtactgggtggagttttagtttgagagtcagggagtgcctctctgaagaaatgtctactatgagacctaaaaaatgagtagaagttgtcagattaaggggaggaaaggtgttttagcctgttttctgctactataacagaataccacaaactgtgtaatttataaacaatagacatttatttggttcatagttctggagactgggaagtccaaggtcaaggggctgcatctggtgagagccttcttgttgcaccataacatggtggaagggcaaacaagcaagtgagacagagagaaaaagtaggccaaactcccaagataactagcctactgccaagataacagcattaacccattcataaggacagagccctcatgactaacctcttaaaagccccactgcctgatagaactatattgacagttaaatttcaatatgaactatggagaacagtttggaggttcctcaagaaactaaaaaaatagctaccatatgatctagcaagcccactgctgggtatatacccaaagtaaaggaaatcaatatattgaagggatatctgcacttccatgtttgttgcagctctgttcacaatagccaagattcagaagcaacctaagtgtccatcaagagatgaatggataaagaaaatgtggtacttatacacaatggagtactattcagccataaaaaagaatgagaccctgtcatttgcagcaacatgggtggaactggaggtcattatattaagagaaataagccaggcaagaaaagacaaacattgcatgttgtcacctatttgtacgatctaaaaatcaaaacaatggaacccaaggagatagagagtagaaggatggttaccagaggctgggaagggtagtggggaaatgggagacagggtagaaaaggttaatgagtacgaacaataattagaatgaatgaataaggcctggtatttgatagcacaatagggtgactgtagtcaatagtaatttaattgtaaatttaaaaataactgtaattggattgtttataccagaaaagacagacgcttggggtgatggatagcccattttccatgatgtgattacacattgcatacctgtatctaaacatctcatgtaccccatgatgcaactaccatatatccacaaaaattaaatataaaacattatataaaaatttccacataattttcaaaagggatactctatagtggcgtggggaggcaatctacacatgagggggaaatacctgccacaactctgaggccagaaagagcctggcttggtgaagagcaggaagaaaaccagaaaagcttgcacaaagatggtggtagcaaggggaagccagcttaggacaaggttgacgaagaggacggggccagatatcgaggaactcgcagggaagagtaaggagtgtggatttctttccaagttcaattggttttcacattgctgatagcatctcccaagtgattacaagtcacattgctctgtatcatccataaattatcctcaagaactcctagggccataacaattttatgaaggactcagctctgataatagaaagtcaatatttttagtctctagcttttcaagtaggcagctggaagtatagccaaaggatttcagatttcacaaatgtgagatcaagagacatctgctagtctctgttcaatctctaattttcctgtgtctttctaagtgacacagaattagtaggcttagaatttgctgtaaaaacttgttaaatccatgctttgttctttaacagcatcttagctcttctgcttactagctttgtgacttggcaagttgtttgacctctcagattctgttttctcatgtataaaatagggacacactacagtagtgattagcactattcaccaaatatttcctgctctctccactttggacacacggtaggattatactctctgccccattcccttgtagttaggtggtgtcaggtgactagttctgacgaatgagctatgcatggaagtgaggtttgccatttccaggctggagcttttgattgcaagtgtgaggctctctgagcaatcctcccctctgctgccggccgctctgtcagcctaggaaatatggagtaggatgcagagttgcccatcaatggacatggtgggttataagcaactgggactttaggttattgaccagcctcactaacagacttacttcataggtttgtgattagaacttgtattcatccattcttacactgctattaaaaatacctgagactgggtaatttataaacaaaagaggtttaattggctcacagttctgcaggctatacaggaagcatagcaacttctggctcaggggagacttcagaaagcttccaattatggcagaaggcaaaggggcagcgaggcacttcacggccagagtaggaagaagagagagggtggggaggtgccacacacttttaaacaaccagctctcatgagaattcactcactatacagtatcaagcagcggacgatgctaaaccattcacgataactttgtccccatgatccactcacctcccaccaggccccttctccaacactggggacatggtgatttgggtggggacatgcatgatttgacatgagatttgggtggggacacagatccataccatatcagaacttaatgggataatagacactaggcaattgttatactatctggcacactatgaagtactaaatataggtttctatatttcaagtaagcattaccggatttctctgcccaagcatttgcgtagctttcaggatttaattttcaagcccagaattgaatgattcaagttaccgttagaaatatttaccctgacatttaattatacatgcaaattattggccatcgtttgtaaatcatatttttggtttatgataataggtgatctgcaagaacctccaagaactgaacattactgtgctcacaaaagtaaactcataatggctgaaaacatatctaatctccttttcaataaataatgatatgcaactgatagctcttgccaaatgtaattgagataaatcttaactgtttgaaaatattaaagaagtatttacttttaattcattacagatgcaaaatgtttgggtttaaaggagaaaaatcaaaagaaaacattctaaaataatatcaatttctttctctccttgccatttttacaaacatactctacctataaacatgcacctgtataaattatgactaaatctatttttactgcttcacagtaaatcttctgctgaatatatggggccttaatctccggtgtattatgtactaaaggctaatagatttggcagcaaaaatagacagttatattccattaaaaaccaactccataattcatgactggactcggggtctgcttccagcccaatggcacacctggctcccaaagctctaaaacaaaatttccagttttataattgccagagtcatagttttctccatttaaaaaaacacatcaatatttatgttgttttccatgtgctctcaaaatgacagcttaaatgatttgacaataagtaaggtttgattaaattcagtagtcccttgacaggggtggtttatttgattattcaaattattaatcatcatgccatctatttaattttttaatacttaaatgaattttttcttgtaaaagaaaatcttgtaaacaaaatcatatcagagaaagccctgcaaattacaaggaagaaataatcactcataattccaaccctagaaaaatatcactgttgaccacttgaggactttaccctagtccttttattctgcaaacatttgccatagaggtgcaatagaacacaaaataatatatgctgcttttaaatatttgtgtataattataaatgcaatctatatagttccttataaggaaatatgaaaattattaagtcaaaaacataacccagggaaaaaaccatcagagatagtcattattcatattttagtgcttcccctaaaagcagccattacttagctactttagcattcactcaaaaggtgtattctgcagaatggtccttagcagtgcaattgtattttccagagtgccaaacatttattcacttttgagttcgagcacccacacacgtcatgcatttgcaatatgaagcaacaacaacgtgttacaccctggtattatcaatgaaattaaacctagcctgtcctctccaagagctccaggtctgaggaggatgtagactaggaaacaattataatacagagtgattaatgctaggatttgagatatgctcaggatgccatggcactgcgatggaacacaaacctcgtctgatggaggagaaggtttcaggaaaaccaaaagcttcctgggggctttgcagtaaggctagttctcaatggatgcagccaaagacagaggaatagagtcacaagtgagcatatgcaatctaggatcaaaggcaattccatatggttggaggatagaaagatagtgacaggagatgaggtgggagaagttggcctgcaggatttgtattccataataagaagcctgaattttatgcaaaatacaacaaagcagttaagcagcagagtgacatattcaggtatgcatttaagaaagagcactctggctgcaggaggggacagataagacatgtggcaaggctgaagctaaagagaacagtaaacaatggtcatcatccagattagaaatggagagagcctaaatgaaggcagcagtaatataatgaatattaagaaagtcaaggaggcttagactattcctatctacatgcagcttggggattaacctcagatgttgatcatgcttgccaaattattaataagacaatatctcaagacctgccttgataatctcctttcagtcttatgatatgaggttaaaaacaaggcaaataatatatcttggattctatcctaaagggatcaatgtaagaaacctggctaaaattctgacaccataattgaaatccaggaacagaggcctatgctacatcacatacggagagcagatggctcagagtgatcatctcaagaacttctcgttgggcaacgtgacttttgcaaaagaactaggaaagtgttcctttgggccatgatgatttatcaaggctagaagttgaaataataaatctattctgaacaatatacttactaaatcgtagtcatttatagccctctaatgagacaggtactcaaatgggtacacatttgctaggtaaacaaatgtattgcatggggaattagggatttacagctagcaggggacattgaggctcaatattgatggtttgctttttccatttcggttgctaatgtgatttatttgcagttttcttaatcaaggtgactgacacagaaactatctaaattttttagcacagcagttaaaacagtccacaatacataatttggctcctaaataatttctcccccaacaattagaactttccgaaactgctttaaatcgccttatgagggtatcatgagtttgtggtcattggaagtattaaaagaaaaaagcctggaatatcagtaatgaaatgcatcaagcaggaatcatacatacattaaaatactggtttatagttttgagggcgttttcttttttttctgttgcagctatgcgaagatatgcttatgtattaattgtttttcttgctaacactgtataagcaaattcaactaaattgatataagattttgcatacaagattagaaaacctgatacctagaattattttaacacacatttttcaagtttgcttatgacttcactaggttagaacttcttaaaaagcaatgctttaaacattttattcattcaacctttattgaaagccaacattgtgttgctggatatgcaaaaataaatcatgtatagtgagctattaaaaatttttatcaacttacaaactgagtacaggtacctactctcactgtaaagccttagcaaaaaaaactgattaaaataatgcataatagtacataaaaaattaaaatcttccattagaggaacaaaaattatgaagaatttctaggagatagaaaataattatgtacagagaagataattcaaaatacatgttggagaaaattactctttcaaaagtcagacatgtccagagaaactggaagggaggaagatagaactgatgggaaacatggcagagggggacacccccatcatgtgatggcaagaaatgctgtttccacctgaatgaattcccaaaatctaaaaaacaggaaagtgagatctgagctgtattcataattctttaacgttttcagtattctctccagcactgcttactgaacttgttcaggagtgaagccacgtgtcccctgggagtgtgctgcactggcaagaagaaatggatgactcacaattttgacagtgactctatagaaagaaaaaaaatctgtgactcagggccttggggagaagtcatctcttcaaaaactcatctgattttttttcatgccatgtaattactcagagaacattaagagtctaaaaaatttcaacactggtgtctaagagatatggaattaccttttgcctgagatgctggaagcagtgggggcaagtttgtaactagaaagatttgagcaagtccaggctcaggtatccaaattgccctctttgctgttggcataggggattgagattttctgggtcttaaataaggttttatttttatctaaggaactatagtttctatgcaaatccgagggggcttagagaaacctagcgtggaaaaaagaaactgtcaaagcagtgtttggggaaatgagatggggaaatttcacgaatagtgggcatagagaaactgactagacaagagaacgtgaacattataatgatatcaaatggaaaatttgaaagtttattttgaaggagatggctaaaaacaattttattctgaatgagaatgtgattgccaagaatcagtcttcaagcaatccaggatttaaatttccttgttctaggctcagaatttaaataggcaaaatgcaggagttcgaggctgtatgagctatgatcatgcctctgcactccagcatgggtacaacagcgagactgtatctaaaagaataaaaataaataaaataaaaaataaatgggcaacaggaaagactttaagaccactctcccctcgctgttcacatggctgggttcttcccattatccaggtttcaattttaagatcacatccttacgtatagttttcactgaatacttagcaatttgatcagcaatttgatcttatataacacattgaaatgcaacacgtgtgtttcaaagtcaagtgattagaagactgtgggccctaactgctgtttatggaagtatgcatccaaagcagatgctgtcagaggtcccatgtacacccaattccattaacagtctcttctgattctttttctcactgacagcctctcagcaagtactggtgctctccctgaggattttctctggctgcaggagcgtgtttcagcgtgcagggcagactggaagaatctgtgagttgatgcctcaggaagcagccctcaacagacatcagacaggaaatgctggataaatatcccaacttctcacctcttgggtaggacaacattgaggaatgtcctgcaaagtctccctagagtcccaaagggcctgagccccagttacccacagcagcaattctgcacattagcacactcctttagtaattttcctcctttcctgtcttatttcctcactcctgtccattgtttcctgggatcactcccgaagcaaatcacttgcactcacatccacatctctacttctggggagtcccaaactcacaagacatttttctacaaaggaaaatcaaatataaaagaaagtagagtaagaagagttgggaccaacaatgactgatgattaagcagcaagaatagcggcaattaaaaactgtagataacactatggatgcactgatgacacagtgtcttggccaagccctgtgggaattcatactgtttgcctgtgtgcagcagcggtgcaagttttgcagtgttgtgaaatatttagtggacgctgactttcacagaatcctgaattactgttctcaataagctccagtattgtgctatttcaaatgtagaaataccaaagtttactaattgtgagctcttaatatagtaacttactagcaggttatataatgaaatgatatcatatggcatatcatttcccataataaagaaaaagctctcagtgttctaccagtttgggcccttaagactcctgataggcaggtagatgctggaccacactctcttcctgcactaaatagaggttgcagacactgggtaaaaccccaagaaccacaagcagatgcccactgctttcctggcagcctgacccttgcaccaaaaatactttaaacaataagttcccagttcttaaaagagcaaacatacctttaaaggaaaaagaaaaaatacacaaaagtcttaccgaccttgggtttaatatttactcttctctttcttaggtcaaagctacggagtataaactgggctcctgccaggttcttaccatattccttcaatagttgtttttcaggaagctctgttttctggaagagataagaaaatagtacctgggaggaaatgagccatgcttgtgttgctgagtgattctaacatgtttggtgggggagaggcacatagatgttaaatcattcaccctttgcagagaacatcctttgggtagagtgtttcttatcctcctccacccagaagccttgtttctagtttcctgtgcttgcaagcttgtctctcccaactaggctgtaaatgaattgagggtaaggatcttgtctaatttacctctacatccccaggacaataagcaagggtgtaaatgcctagttcccttgcccaggtaaagagaaaagcgcacctgaggcaagattccactgcagcgccccctgcaggctccacagacgtggtctgaattcaccgccagcttcacttccttccattccctgtcctacttcccccattcctttactgtctctgtggagccttccttagtaaaccacttgcacacaattctcaaggtttgcttatgaagatcaacagctatgacatcaacccataggacaaaaaaacagagcaatagaaaaattagtaggcaatagaaaaattaatgactgccatgtcatcttagagaaggatcctcgatttccactcaaattagcttgagtggaaagtttacagaggactctacattgctagaagtactggacgggcttggggggattcgcaagtcacctttacttgctagggccacatggtgtctctcctctgtttctcttagcacttgtactcgtctttttttgctgtagtcccatattgcctatgatgttttactctaatgtaatgtgtttgcacatgactgtggcttcctaaggcaaagaagctcttgccctggctctatagagaaccagcttatccagtcccttaattctgtaggtccaaatgccagacaaaaacaaaataaaataaaaaaacagactctgatgagcccatccaaggtcaagtccctgccccatccaaatcagattcaacagtggaaacagagtcatctgccatgacacaaccacttctttgacggtactgtgggcatgagtggactttttcaggaggaattatgcactcagggtaatgactgacatctgtagggcaataacaagccaacactgcttgttagattcccagtcctcttgaacatgttccatcaactccattctcatgggcttgctcactgtctaccaacatactgggctaaatttgcctccaggcttcctctcattgtccctcaaattatataggcgttggctcttttctgaaaacaatatccttcatttcctactttccccatgaagcctttcccagaattccaattgtcccctaatgcctaaatcaacattttattttgtccatttacccactggtgcatggtagcaccagggttgtcttccttacttagagaataagttcctccaaatcagggagggaccatgcctcctatttcttctgtttcacttatatcatttggcacgattctgagcacgtagccagcaaaacatagctgcttctccctaatgtactgaatgaagtagataaagcttttctacagcacctatttcagtgccttaatcataggctggataagaaactttttgtactactgccccttgggcctcaccactacagcatgagcttattccacttccaactgccaggatctgtatctctttgccagagggctttttcccaagcagcaggaagcctttctggccttgggcatagtagactggatagtctggaatattaattgctggcagcactcaattcaggagctggtggaagtaacccagctccctcacccctccatgggtgtcaagacttggttccttccagtgggttcatggtctcgctgacttcaagaatggagctgcggaccttcgcagtgagtgttacagctcttaaagatgacacggacccaaagagtgagcagtagcaaggtttattgtgaagagcgaaaggacaaagcttccacacagcgtggaaggggacccaagcaggttgccactgctgggtggggtggccagcttttattcccttatttgcccctcctgtgttccatttctgtcctatcagagtgccctttcttcaatcctccccatgattggctacttttagaatcctgctgattggtgcatttttacagagtgcagattggtgcattttataatccctttgctagctacagagcactgactggtgcattttacaatcctagctacagagtgctgattggtgcattttacaatcctcttgtaagacagaaaagttctccaagttcccacttgacccgggaagtccagctggcttcacttctcagtaggttaactctgagtgttctacactgtttcccagagttccccagtgggcttgagccccagctgcccacagtggtgacttacttgataatggcctcctgtgtctgcctttccttcctgtctcacttctacacttccctgttagtgtttcctgggatcacctcccaagtaaaccacttacacttgaattcttgtctccgagtctgcttttaaggaaacctaaactaagacaatgttcaataaatgccaatggaaaggttgaaaaggtaattttcaccttccccctcacaggtagagaagctaggccattgacagggttggatttctcaagactggcaggatagaggactccactcctatggaagcacctttcaagaagagacggtatgggaatcagtttaaaacacaaagcactgcatccttgggggcatctgttaagttcattgcacccaaccagacctcctagagagggcaggtgctgacaacataactgccaacaatttactggtccaatttgtgataggcaatatataactcggcagcccagaagccacatccccatttgtcttggttttcattaattcaaaaaagaggaagaaaccaataatgataataataataacaataacaacaactattagactttctgctaacctgggtgagcagcatttgacttgagctatgaaatcagaaaaatgtccctttcttgcatcttaattttgcaacaaattcaacctgttaatatagtccttcaggaattaaacagacaaaaccatacaaatgcttggaggatgatgggaaaaaccagttacttctgactaactggaagggcagcttgatcatttctgatggttgattgcataatttcagtccttgaacatttagtgtgccatccccttggttgctggaggaatgcaattgctctatgaaatgtgaagagacttgacaagaactattttcatggttatgtgccaagttcttgctttaacttgcttgcttaatcaaatgtctactcatgatatctttgggagtttctaagtttcattagctctttccttaaagagaaattaatctacttggcaaggaaggtttattcatcataggtgagcaaacattagcactttctaataattagttccaagatccagtttctagatacctaccaagttcagccctggttcacaagaaattgacctattttcagtggaagcactgtaaccagtgcaataaactctatctcatagaacagtgttaatctgtcatcacagccaaaatgatttgttatagcaaagcaacaatcagagtaaatgatgcctgtcccttcattaaggaaatctagaagaatgctctgtcatgagtttaatctgagatttgcctggctatcctgatgaaaaccatctaatgaatatgtaaatttatcattgtcttctattgtaaaaatgcacagcaaattttctgcttggctatgcataatcagaagagaaatcctcactgctgtgaatttgaacttgaataaaaattgtcttctcaggaaaagagcatgctagatggaggaggggttaacaagagccttcagtttacagatgtaggatgtcttcctgctgttaattattgtggtaggcagtgtaatggccttctccccaaagacatccacattctaatccttggaaactgaatatgttatctcacacagcatggggcccactggcactggacccctccagttggcaggtccactgaggcttgggtacatgggtagacattcaccctcatttaccattctgctgaaactgtatctctaggtttctgaatgggaagaaggagcctactggaaggaagagtcatggctcctggaaagtgggggaaatgaagcaaaatggagttctttccagagttgccagattatttcaataaaaatatcagacatgtgtgagtaaaaaacatggacaaaatagcaacaaaaatgcaatatagaaagatttctggaaacaatccataacgtcttatattttgcactgaatacaatgacattttttcatttctttatttttcagaaactcaggttttgtacacttgaactagaaaagcatcacataggtcaagacaagaaaaaaaaattttcaaacatcagttaatgacatgaaaaataataaaaactatttagttagattgtttagacttttataaggaagactaatataaatttactgacacatttcttcaatgtgtttccagaataaaagctcaaactctcaatgctttcagaataaaagaccacacatgatcttcggtgtggtaaacaccctccagagtacttcaaatcatgggttagacagaaactacagaccagcaatatccaatggaaatatagcatgaaccatgttcaaagaagttgaaggaaacatatgaaattatttgtaagaatctatcttatttaacttgatatagcaaaaacatcatttcaatgtgtaaacaatataaaaattaactaaatattttgctttttcaaatctattcttgaaatccgatgtgtaatgtacttaaaccatatctcaatttagatagtaaaatttatcagaaataattaatctgtagttacatttcataaaatttatcattggcaagtaagattcacatactcaagttgttctaagcatacattaaaaagttttcaataactgaatcagttttttattttaatttttaattacaattaaataaaattagaaattcagttctttaatcacagtaggcagccgggcacggtggctcacacctgtgatcccagcactttgggaggtcgagatgggtggatcacgaggtcaggaggttgagaccatcctggccaacatggtgaaaccttgtcgctggtaaaatacacacacaaaaaaattagtctggcgtggtggagcgcaacagtcgtcccatctagtcaggaggctgagacaggggaatcgcttgaacccaggaggtagaggttgcagtgagccaagatcgtgccactgcactccagcctagtgacagagtgagactctgtctcaaaaaaaaaaaaaaaaaaaatcgcagtagccaccttttatatgcctagttgacacctgtagcttatggctaccatattgaacatcacaacactagctcatacacaatgattataagaatgtgtgagatttgtttcactttcataaattttttgtgctaattttctatgtgacccatttttttctccatgtttaatctgaagcctttaaatgagaggcccttgtgttcttgtcagtggtgtcaataaggaagtgaagaaggtaagaaggaaaggggagaagtttctatgaaagaatggaggatgttggcagaagcttcagagaaaggaaatcagcctaactctccaagatctgttgggcagaaagaacagaggttcccagggcagtaggatgggcctggaaattgttctagcacactttcagactgggctcttgtttacaaatgacagaaacttgattcaaactggctttgacaatgaaagtactctatcaattcaaataaataaaacatctacatgttctgtagtgagaagctcaggcatggctaaatccagaggatcaaataatgtcatcacaaatttatttttcttaatctctcagcatcaatgtccctgtgttgctttaaatccaatcagggtttcaccatagtaaaaagatggccaccagctaccccaacctatgtcctattcttaacaactctaccaaaaagagtacttctttctgagaagccccagccaatgtcctgggctgatactccctggtctgggcatagatcttatgctcattcctcaactaattcccaggcctggtgaatttcccagctttggagatggagggttggatctgaccactcaacccccatgaattagaaaagggagagtgatttgttcttccaagggaaaatcaggctgctatagctaggagaagagggaatggatgctgggcaggaaaaatttcttgtgtgttaaatcaagacttttgacaatgaggaggctagtcagttcccccaaaataatttattcagactttaggtgtttcatgaagaaaattgtatcatctgccaagcacctaatctcctttccccattagtcagtcacatgggaattcatacctttttaaagctacctaaccttgaaaaagttgtttaatctcaccatgattcagattttccatctataaaatggaaatgataatagggcctacctcatacatttataataaagattacatttaatcttatataataagataatataataaagattatatttaatcttttataaatgtatgaggtaggtcctattatcattcctattttatttgttcttatttgtgaagtgcttgcaataaagtctggcagatgacaagggtttaaaaaaaccccactaaataaatacacaaaagtgtgatattatacatttttctcagaaaagaagattcattgacttctcaaatgaattcatctaggcttcttcccatcaaggtggcctccagagagatgagaaactactggaaatgtttactaaataaatgagtctcattttcaaaggaaaggtcatagacactttttaagacacacagatgtcctttaatgcagctcatctgtattgtaatttctgtgagcttgcattagaatgtaattaaattaacaccaatgcagtcctcctgtcaaggaagctctgcctaatgtaatggcgtcaaggaacaatctgagcattacacatatcatgaggaattgtttccatccccattctattcttattgtcacaatatttggtttaattaagttatataggatagtaattatagcaaatgtagtttggctgggaaaatactccttgtgatatgaaggtcgcatctccagacaccactgctggggaaggcagaattcagtccctacttaggacataaaaactctcagacacataagaagactgagaataggaattgcctgctcctgaaaatgccaaattgatatatggtgagaagccgagtcttagagtccctttattgttggatacattcaataaataaaaggaaagagccacctataaaaggtaattcaagggaccatatgctctacctttccaaaaagataagtctaaaattacagccctagggtcagttctctgatttggcattgcctcaagtaggcccttgcctgttacagggacatttgctacctggagggaaacacattaacattctagcaccaccaccactgtcatgtaggtaatgtactagattactcagccgggtgtgggaatgttcccattcctcactcttccccatacccatgtccttgcccaagaactctccagttccttcctctagaaagtgtgctttgtcccatgtggcttgctttggccagtgacgtatgggaaagagtgaggatgtactgttctgaccctacacccaaagaagtgctatccctttctgctcactcctcttggtttctgccacaccattcttctattctagaagaatgtgagacatatggaacagaggcaccctggccaatcagcaactctgtgagtgtgatcatcaatgcttatcattaaacgccactgagatttggggtggtttgttgcgcagtatggctgaggtaacagttgactaatacactggttattcagctaagacagagagacgctctgagtgtcttaaccatagcaagtaaagtttcctgtaagacaaggcagaatttgtagccttcattgtagccattccctggccctttttccttgctttgtataattatagaatctaaggagtgaaatactcaagttccagaattttttacagctagggtggccatatgatgcatttgtagccagtgatacatgtttttttttttttttttttttttgcaggggactcctggaaatacttttgccgtcatgaaaaaagcagacttttgttactgctcttctcccttcttcctgccttgaaggcagtcatgattcctgaaactaatgcagccaaggtgcagccaggaggggagcagtgtgaggttgaaaaatcaacagcttaaggagggcagagtaggaagatggaaaaggcatgagtctttgatgatgttgctgagttagctaaaccccagtaacaaatgcctcagtcttctttttcttagagctaaaattagtgtccattttgtttaagcccctattagatgggtgatatctaatgtgatatctaaaattaaatgaatttctaactgatatgcctaatttacagtttggcttggaactggcttagtctgtttgcatcagaaagatggcatagtttcccccattgggtattagagaaactaaaatagaaagaaactgaaagttttatggcctactgaggtcagaaggaggggagagcagggaagcagcagtctcaacctttaacagcaaatcgaagtcccctaggaattgagatggggaagacttggaacacctctcttctctgtgtcttgtcctgtttacctattaaaacccaacccatccattcctagcctcttccatgaagctttctcaaaatccagccagagtgaaccacagctttctctgaatatctagagttgtttattggttttgatctatgtgtgcccctcaattgacacatcacacttgtccctgcatgagtccagctgtgtaatgtgtcttatcttccctacaaagataacatcttaatctctgcagaatctcctgcagaacctagtaaatacgcagcatacatcaagtctttagtaaccagtaataacaattaattacataaaatgaatataaacttgctttataacaagcctatcatcacacctctgcttatgggtgtatctggaaacttaattaggagttggtagcaaaaacagtcagctatttctcttctattgcagaggaaatagattaggagagaaatgagagaggacaacagagaggagaaacaaagaacagttcaaagtcacctccaaagagaccagagtctctgtataatttattccctcttgggagcattcctatcagtagttctgatgaaaagagagttagcaatctggcaccgttttgcatatttacactgttccttaaaatatatgttgaatcatttagactttttagcttccactttagtaaaaaaaaaaaaaaaaaaaaaaaaagagggaaagtctaagctggagagtgctagaactcataattaagaaggaggggagtcttacactggtcccccagaagcagacactgaaacaagggtttgagtccagatggtttatttgtgaggtgaccccaggaaccattgtaggaaaatgtggaaatgagacagtgaaggaaaggaagctaacacaggtgcattaatgagtgggtaattggaaatcagtccccacggaaagctctatgtagaacacagctccaaattgttccccatgtgtgatgaggagctgggatatttatctactaactcccatttgcacttgggcccattgggcactcctagactgccccacgcataactgatcatgctcctgcagccaaagaaagtccttaagcagagaatccaaggtgcttgcagtaagaaaccattggcatgtgcaggaatactgagtattgatgatatgtaaatagggcatcaatcgtgtctgctatatggggaaaagtaaagggtagcagagtaggggctgggggatgagaaagcaaggaatgaggagcactcacttggggaggactgccaactgtgtagccaggtctcaatgaacaaaagtaggcattctgttgaaactgctggggaagtctataatataatacctctaccatttatcttaattgtctttagatatagaatgccttcaaaatcataagggccaaaacttatatttatcaaccttcctgtcccgtattgagggaataatagagtacatccatatagcagaatattctgaatctgtttaaaattatgatgcatagtttcaataaaaagaaaaggcatttataatttaaagttaagtggtttttttaaaaggcaagatctaaaattgtatatctggtaggatttccacactgtaaaaaacatgtactgaaccaatattggaagaaaatgttaactttttaaaagtttttgagtggtgggattgtagttactttcctctgcttccttataattttctaaagtttacctgctttccacaaggacatgtattacttataactataaagattttttatgaaatctctaaatataaataaatgtgtatatatatatgtatatatatatatatatatatatatatatatagccactcattgccaccaatggtcctgcaataacttggcccatctgagcctttgttgttagattctgtttaggactgtgctcaagggcactggctcccaggagattaacatcttcagctttgctctcatttcccaagaagtcggtgtcacatttcagttcagccaacgaacaggtattcactaatttaataaatattgatagattacccagtgtatgccaggcactaaataaaaccaaatatagtttccagccctcatggagggaactgagtaataaaagcaaatgaataaaactgtccatctttgagtagtcctatgcaggagagatgcctggttgtattagaatctgcagtaggagatttggatctaatgggttgggctgccctcaggaagtgagggtcaacttaagatcccaaggatgcatggaagttaaccaggcaaatgttaattgggcttctaatgtgtgcaaggggtcaccatgctggagtcttgggacacaaacttctgtcctcaaggatctagccatctgattgccaagccacaatcaggattcctaaaataaaagaaaaatccccaccggtattagattaaggccccggatgtctataagaagttcaaaggaggagcaatcaataagggctaaagtagtccagaaagactccagagaaaaagtagcttaggtgcacttttttgtcagccagaaggacaggcttgcctagcaaggggaactgcatgagcaaaagtccagaagggtcaatgccaataatctttatataagagagtaagatgagaggttgcaactgaaactgttactggaaaggcatcccgatcctgaccccaagagagggttcttgcatctcacacaagaaaaacttctaggccaatccataaagtgaaagcaagtttacttaaaaagtaagggaataaagaatggctactccataggcagagcagccctgagggctgctggttgcccatttttatggttttttcttgattatatgctaaacaaagggtggattaataatgagctttccaggaaaggactgggcaattcctgtaactaacggttcctcaggcttttagaccatatagggtaaattcctgacgttgccatgcacctgtacattgtcatggtgctggtgggagtgtctcttagcatgctaaagcattataattgacctataatgagcaatgaggatgaccagaggtcactctcattgctctcttggttttggtgggttttggccatcttctttactgtaatctgttttatcagcaaggtctttatggcctatatcttgtactgacctcccatctcatgctgtgacttagaatgcctaaccatctgggaatgaggacaagaggacagcttcaacttttcatgacttcatctccaacccaaccaatcagcactttccacttcctgcaccccctacccatcaatttatccttaaaatccccagtctccaaatttttggtaagattgacttgagtagtaataaaactctggcctcgcattctgccggctctgcgagaattaaactctttatggcaatttctctgtcttgataaatcgattctatctggacagctggcaaaatgaacctgttgagcagttacaagagtaaaggatgagtactgagtggaaaggatggcctgtccttgggagtcgggtaaggacacttgaactcatgatagaagctagggagcaaagagtgatcagacaaaagttgtatctataggaggatgggtgtggattactgaggccagtccctatgacctctctctttccagggccaggaactattactgttttttgtgactttggtaagtaagtgaacccagggcatggtttgcaactggctgcgttggtcatttttatgaatcgatttgtgcaaacccatggcaagctttcctaatataaacaggtggaaagagagaagtcagaggggctggcctcagtaatccagacagcaaatcttacagggaagaccctccttatatcctggggaaattggtatatgagaagttaactgggtttttaccctctgaaaaggaaatttctataagaaagggaagcatcactgcattgcttgataacatctgttttatcttgcttgttttatctgactttctcccatggccaaggaaacatgatgaaagaaccaatttctttcctcttttagaagctctgatcatggaggagaccatatctgcaagtcatctaggactcagctcttttagagctatccatggactgggagacccttctcccacttcaaggagcccctcttttgtaccccccaaacttcctggcttacaaaatttgctgccagatgtggtggtgtgggagtgagggtgggtggcataggtcatgttggtaaaaggcctcccataggcgggaaaactgcagagccagggggcctaggggaaggcatctcttgcctagcagatgctgacagaggaaatggcacattctgcccatgcatctgtcctcatgattcacatgccagcaattcctcaggctagaacataccttgtaggtcattttctagcacatgccgtaactagatagcccctaggtctctctaggaaaggtgactttctaaactttttttgtattctgtctgtaaagtactgcatactttaaggactttttaaacaataatagagaaatcagcttcatccctgcttcaagacacatcacaaagctccaatcacaaaaactctagagtttctgtagagggattaaagtgtggcagtctagtgacctaaagggatttgacttgaagctgtatttgcttagcacacacgctgtttttatcttgattttaagtttattggtgcagcacatggaaataatgggcatcaaagcccacacctcccaagctggtccttgatgccatcactgagccctaagtgagaggcctgcttataatagtcctgcattctcagcttcccttaaccccaagaatagaacggtgtcttgcatgcagaaataggttattggtgaataaattgcttaatgaattatctagtttccctaacagagctggttacttctttctcatgtgaaggtgagcacctggtgaggttttcaggaatcaggttcaccttgaacaccatactcaggccttggcggctctctgggcctgcctggctcctacaaacaccatgcagtgtttctggatctcctaggccctctagtggctattcttaggctgaaatccctcagaactcagcctctcagctcctgctaaaatttcaaccagtccctgaatttagaaatatgtatatatacttattttgcttctcgtaaactgcaaagaaataaatttaattatgtctagtttctgatcaagatttatctggtctcatagccttcccctggtttgtgttttaatgagctttttatttttcagttgaaagattataccagatgtcaagacttaacaggaatcaagacagcatggattgatataagggtagacataattatcaatggacagagtacagactccagacacagacctacacctatataagcaactgattttcaaaagtatcctgcttgcctgcttgtacccccaaatgggctctccctcaccccaaatgcatctttaggtttgtttcagagaatttctgatggtctttctcgcacagaaacacacaaggggtctaaatgggttctttatgcagaagagcgaagatttccaggtccagtgggccaaagtgccttcccctgcaaagcctttgagtgattccaggcaccaggggcatcaaagccttggtgggaccagaaactattgctgttttttatgactttggtaagcacgtgaactcagggcatggtttgaaactggctgtgttggtcatttttatgaactgatttgtacaaacccatgggaagctttcctaaatagaaacagtctgcattatggtggtatcaccttcatctgacccctgggagctctaaagaaaagcccatgatactcacctggccttcagcctgaccaggggattaggccactggccaggatgagactgaaggaggaaaggaacctatacaactactcttcccttggttgaaaggaaagtccagagagaatagctatttgcaaatatctgggcttctactgggtgcttactgttgagtatcttatattgggacacaggtatgttcatctccattttacagatgaggaaatcgaggctcagagttaaatatatttcccaaggtcaactaagtaagtggcaggattaggatccaaacccaattctaacactctctaaaacccactctttagctagcccctgcctcttagctttggggttcaggttcttgactcagtctatgcaaatgttgccttctggaatttggcagtgcacaacctgcacatctgtacagtgtagctgaaaccaacttctgggttgaaacccttccatattcaagattctaagcctgggctaaaatctagagccttgttactcaaagtggtccctgaacctgcaacatcagccgtgtttgggagctttttagaaatgtaaatttctgctctcctgctgccactccccccaacccctttctattggattacactctccaagaatggaggctgcacccaggatttctcagctgttatgtgcattcaaatcactgggaatcttgttaaatggagattctggcacaggagttctaaagaggtagtgctaagcttttgcttcttcgggcagctcccagatgatgccgatgatgtgagccacacttggaataacacagctttagatcagtaagtctcaaacttgaacctgtattcaaatcacctgaagagctcgttaatacacaaattgctgggccctactctcacactctcttacaatagctgtgcaccttcacctttactttcaccccaagaataaaacagtttcttgcacacagaaataggttatccatgaataagttggttaattaattatctacctttgctaatagagctggttacctctttctcatgtgaacatgagtacctgctgagagagtgcttcagagggtctggagtggagcctgaaaatttgcatttctaacaagttctgggcccagcatggtggctcatgcctgtaatcccagtgctttggtaagccgaggcaggagtatcactcgaggccaggagtttgagaccagcctgggcaatatagtgagaccccatctctacaaaaactttttaaaaattagccaggcattgtggtgtgagcctgttgtcccatctacatgggaggaagatcccttcagctgagaagttcgaggctgcagtgagctgtgatctaacaagttcctaggtgatgttgcgatgctgcaggtttagggaccccactttgagaaccagtgttctagcctatcagaacttcctctaattagacaactaactccatgctttctggcatttcatttttataaagccctattcggtccttgaattctagcattttagagctgaaagggacttcagaggctaccttgtctcaattaaagaaatgcaggtcaagggtcccactcaaggccatacaattagccaagaggcaaagtcaggattaagcatcctgactcactctatttctatgctgtttactctgcatcctgctggctccaaagctcaataaattccctggcatccagcaactgcagtatttttggtgagctctccatcccaggccagctttgaggtgctagaatccctgtcagacacatatgtcatccgcacaatcatggaaacgcagtggcctcctacctaacagctctgtgaaagagggctttggaaaaaaacagcagctgtgctggccactgtagcagagagaaaatgcagcagctagcaagcaaacccagacaaggtgagtcagcatagaggccctggggctaaggaatataccaggatactgccaacaactggcacccagattctcctgagcaaatctgagaaggtcaatcaacttctctgtgcctgaaaagatgcttttctttagagaaaacaatactcttattcaagggaatgaacacacaagaggatatcaaaaatgtgcttggggtgggagttgtatcagtcctgctgcatgacaaatcacccaaaacttagttgctttaaacgacaaccatattcttgctcacaagtctctgagaaaaaggagaaatgcttaagatcccttgaagcctagacttggaactggcatatcatcacttcctccatactctactggccaaagcaagacccaaggtgagcccacttcttaatgaaaggaactgtaactttacagtataaggatgtagagaggcggaaggtttgtggccatttttgcaatctacgacagagaggtcttcttagtttaggaaagtctgagacaaagattccaaagcaaatggtttacttggaaaggaaaggaaataccggtaggggagagaaaaatggagacacagagaagcagcagccagtaaagggtgcaaagccaagtcggctggcgctctgggcagctggagtataattccactggagaactctggaagctggtgcaggacacaggcctcatcatcatcctacctaaaggaggacgccaggatgtttatacatcaatccatgatatggtttggatctgggtccctgcccaaaactcacattgaattgcaatccccgatgatggagatggatcctggatcctggtgggatgtgatgggatcacagtggtggattcctcatgaatggcttagcatccccgtggtgctgctcccatgataatgagtgagttctaatgagatctagttgtttaaaagtatatagcacctccctcactccaactttctcttgctcctactcctgccgtgtgagacatcttatacctccttcctcttccaccgtgattggaaacttcctgaggtgtcctcagaagcagaagccattatgcttgctgtacagcccgcagaactgtgaatccattaaacctcttttctttacaaattacccagtctcagatatttctcaatgcacgaacacactaatacaatccgtatcagtcatttactgaggctgctctcagagcacagaaattccctgtaatttcagccctccactctgggcaatgtggcttaagaggtcagagcaagaccttgacaaaaaaataaaaaaagaaaagcagatgcagctagcttagctggaccgttgtgccctgcagcggttagacaaagaggataaaagggaaggaggatatgagtagggcaccacctacaacatatccttcactgtgatggtgattaaaaagaaaaaaaaaaactcaagtttcagatttatgttattttagtcaaaacatctttttttctttttttaagactgtttactgtattttggatgatgcctcagttctcttgctggcagaggttggaacactagatggcattgtattaagttgtcctatagctcaggaaaaaaaaaaatgcaaagggatgttcctagttgtctttggaatttaacaattatcagcatgagttgagagcaaacaactgtcccagccaaagtgatgatgggtcgcttcagctctaccaaggccaccactccatcttgatctcacaccttggcagcaacatcacaaaccatgggggccaaagcacaaagggagcaggctaagataggaggcattttctaaaaactaggattcgcaaaacccatgggaggagaagcagtaaggagaacgaagccttctgcctcaagaaaggtctttgagaggcacagaaaaatggactgcaagaaaaaagcagcaaacttatagtaaagatttattcttactttagtaatagtaaagatttattctttgctgtaagttaggtgtcttggtgttgcctgaaaagagatactgcctttctcccttgaatgtaaatgagagagaactcttgatgtcttttaccaacttagagaaagcccatacccagccttcacaaaatgccatgagaaaaagaggggtcaggtgtggtggctcacgcctgtaatcgcagcactttgggaggccaaagcgggcagatcacctgaggagatcaggagttcaagaccaggctggccaacatggtgaaaccccgtctctgctaaaagtatgaaaataaaaaaaatgaagaatttactcttgggggcaggaatggaaatgagagtggcaataggatggggttgaaagtgagggtcaaaggcatttaacattttctttaaaatattttaaacaagtgagataaaatgtcaacaatgatcaattcctcataatggatattaggtggatgtcatcttattatctttatcttaaatttcaaaaaagaagagaaaagaatatgatgttctcttgtaattagcaagggctgatagggttcaagaggtgacactgatatggatcttgagtaactgttgacaaatacttccctttactgagcttccattttcttgtttataaactgaggataatgatagtagtgatgtcagggaattgtcataaacctcgactaaaataatgtactcggaacagtgcctaaagcaaggtgggaacagtgcccaaagcaagggggtccctcaaaaaatgcttgcttgcccaggaccctcaccagccaccaccaccaatgtgagtacaaggattagttaggctcatctttctcactgagtcaaaccatacgattggctggttgtctggatgtgattagaaacagaaaaatcttaaataaagcctcatcctgaatcctctcaatccagagacagagttgacctaagaccaaaaaaaaaaaaaaaaaatagaaaatagtttttggaaatatgggtgaagagacatctcctcttatggaaaaagggattctagaatttaacaataaatattcccaactttccccaaggctttaaaatctaccttgaaggagcagctgatgtatttctagaacagacttaggtgtcttggtgtggcctgtaaagagatactgtctttctcttttgagtgtaagagagaaaggacagtctactcaataaagagtgctgggaaaactgaatatccacacacagaataataaaactagatcctatctctcaccatatacaaagatcaactcaaaacaaattaaagacctaaatgtaagacaagaaattataaaactactagaaaaaaacacaagggaaatgcttcaggacattggcctgggcaaagattttataaataagacctcaatagcacaaaccacaaaagtaaaaataggcaaataggattatatcaaactaaaaagcttctgcacagcaaagaaaacaatcaacagagtaaagagacaacctgaagaatgagagaaaatatttgcaaagtattcatctgacaagggactaacaaccaaaatatacaagtaactcaacagcaaaccatcgtcgtcatcatcatcatcatcatccaatttttataatggacaaatggtctgaatagacatttctcaaaaggagacacacaaatggccaacaagtataagaaagaatgctcaacaccactgatcatcaggaaaatgcaaatcaaaaccacagtgagatatcatgtcatcccagttacgatagctaattatttttttcttttttcttttttattatttcaatagtttggggggagcaggtggtatttggttacatgaataagttcttttgtggtgatttctgatattttggtgtacccatcacctgagcagtgtacactgtactcaatgtgtagtaccacccctgagtccccagagttcattatatcattcttacacctttgcatcctcatagcttagctcccatttataagtgagaacatataaggtttagttttccattcctgagttacttcacttagaaaaatgggctccaacttcatccaggttgctgtgaatgccattatttcattcctttttatggctgagtagtattccatggtatatatataccacattttctttatccactcattggtcaatggtcctttaggctggttccatattttgcaattgcaaattgtgcttctataaatatgtgtgtgctgctataaaaacatgtatacttttcatacaatgatttcttttcatctgagtagatctagtagtgggattgctggatcaaatggcagttctacttttagttctttaaggagtctccatacagttttccacagtggttggactagtttacattcccaccagcagaagtaaggtggtatcacattttggttttaatttgcatttccctgataattagtgatgttgagcattttctcatatgtttattggccatttgtgtatcttcttttgagaattgtctattcatgtctttagcccactttttgatgggattatttgtttgttcttgctgatttgtttgagttccttgtagattatggatattagtcctttgttggatgcatagtttgtgaatattttctcccactttgtgggttgtctgttaactctgtggattatttcttttgctgtgcaagagctttttagtttaattaagtcccatctgtttatctttgtttttgttgcatttgcttttgggttcttggtcatgaactctttgcctaagccaatgcctagaagagttttggggatgttaccctctaaaatttttatagtttcaaggcttagatttaagtctttgatccataagatggctaattataaaaaaaagataaaaaatagcaaatgttggcaaagatgtagagaaaaggggaactcttgtacactgttggtgggaatataaattagtacagacattatgagaaacagtagggagttttctcaaaaaactaaaaatagaactatcatatgatacagcaattccactactgaatatatatttcaaggaaaggatatcagtatgtcaaagagatatgtgcacttctatgttcattatttataaataaataaataaattatttatttataaatgaactccaatgttcatttattcacaatggccaagatacagatcaacctaagtattcatcaacagatgaatggaaatgaatgtttggtaacaaaaaaaaaagatgaatggataaagaaaatgtgatatatatgtatgcaatgggatactattcagccatataaaaaataaaatcctgccatttgtggcaacatggatgagcctggaggacattatgttaagtgaaataccacatgttctcacttatgtgtggaagctaaaaaaggtgaggtatggaagtagagagtaaaacagtggttactagaggctggtaagggaagggggaaggaggaaatagggagaggttggttaacagatacaaaattacagctaggtaaggtaaataagttctagtgtttttcagcactctaaggttactatagttagcaatattttatatttcaaaataactagaagtaagaattttaaacattcctaacacaaagaaatgataaatgtttgagaaaataggtatgttaattaccttgatttgatcattacacattgtatataggtgtcaaaatatcatactatactgcataaatatgtataattattgtgtcaattaaaacatgtgtaggacacagctaaagtagtactgagagtaaaacgtatatcactaagtgcatacattgcaaaaggagaaaatcctcaaataaaaattctaacctcccacctcaaagagaagggagggcatgacaaaaataagagcaaaaaaatcaacaaaattgaaaacttaaaatcaataaagagctggttccttgaaaacatcaatgatatttacaaacatcaaagcagataaaaagaataaaggtcggtatcaggaatgaaacagggaatatcactacagatgttttcaacaaaaggtgatggcacaattaaacatccataaactataaaatgaactctaagtttcacatcttatacaaaaattaactaaaatttattatccacttgtgatatggtttggctgtgtcaccacccaaatctcaccttgaattgtagcttccataattgccaggtgttgtgggagggacccagtgggaggtaattgaattatgggggtgggtttttccatgctgttctcatgatagtgaataagtctcacaagatctgatggttttataaagggcagctcccctgcacatggtcttttgcctgccaccatgtaagacatgcctttgctcctccttcgtcttccactatgattgtgaggcctccctagccatgcggaactgatgagtctattaaacctcttttttctttataaatcacccagtcttgggtattttttcatagcagtatgaaaatgggctactacaacttgtaaacctataaaacctttagaaaaaaaaaaacacaagaaaaactctttggtatataaaactaggcaaagggttcttagacaccaaaaatgtgattcataaaaagaaaaattgaaaaagtgaactccaccaaagttagaaaattttgctctgtgaaagaacctattaaggagataaaaagacaaggtacaaactagaagaaaatatttgcaaaccacatacatgtcaaaggactagtacctaggatatataaaaagctcttaaatgaaacagtaaacaaacaattcaattagaaaataggcaaaagaaagagatatttcactgaagatgttatattgatggaaattaaacacataaaaagaagttcaacaacattagccacttggaaaaagcaaattaaaaccacattgagatatcattacacatctatcagaatagctaaaattaaaaaagaattaacaaaaccaaatattggaaaggatgcagagatatcatatcactcaaatattgctgctgggaatataaagtggtgtggctattctggaaacagtcccacagtttcttaaaaaaggaataaacatgcacctgtgaggctgggttctcatgcctgtaatcccagcactttgggaggccgaggcgggcagatcacaaggtcaggagttcaagaccagcctggccaacatggtgaaaccccatctctactaaaaatgcaataaattaactggacgtggtggtgggtgcctgtaatcccagctactcaggaggctgaggcaggagaatcgcttgaacgtgggaggtggaggttgcagtgagccaagatcatgccactgcagtccagcctgggcaacactgtgagacttgttctcaaaaaaagaaaaaaaaatgcacttgctatatggcccagcaattgctctcctgagcatttatctcagataaataaaaatttatgttcccacaaaaacctgtacatgaatacttatagcagatttattcataatagcacaaaactacaaggcacccagatgttcttcagatgatgcatagttaaacaaaccattccatacaatgaaatattactcagcaagacaatggaaggagttattgatacatgtaataatctgaatgaatctccagggaattatactgagtgaaaagaaaagccaatccccgaagatttcacacgataagcctttctttatatagcattcttaaaatgacaaacttaaagaaatgaaaaacagattgctagttgccaggggttaaggaccaggcaagggtggaagggaagttggtttgactataaaagtatagcatgaatgatccttgtggtgatggaaatgttctgtatcctggctgcatcaatatcaatatccttgttgtgatattacactacagtgttgtaagatgtcaccactggaggacactgggtaattggtatacaagattcctttgtatcattttttataaattcatgtgaatctacaattatctcaaaaagtttattttaaaaaaatgttaaggctaaagtgaatttcatatatgaaagaggtcaagtggagaaataattggaaagagcactggacgttgggtcaggagttttagattcaggttttgattcaatcaacttaagtaaataactcctcttgtctaaaattatttgtataatgcaattgacaagacctgctacagttatctcccagagttgataataggtaaaaattatattaattaagagaaaaactttaaaaacataagaaccaaggctctatataaatatttggtatttaaaagcttgcattatataaatgatgcctcaaagcctatttctcctggtagtttagaaatataattacctggataagaccaccaactaatttcactttcaccgtcattcagtaaatctcagaaatataagcaaagaacaatcttggacaagagaaaagaagaacctgatctcttttccagccctatgactcactgaagaaaccaggaatatgccacgtgttctctttctgctgcaagggttgctgtgaaataacctcatttaagctgtgttgtacagaatggaccaccttaatgctgagattccaacattttctatttcaggactggtttggggagattgcacagagttcatcctatgatccttcatgtgagaaggaagccattcggccatttatagcctaaagaagacagagctagaagggataaagccaatcttggctattgctgctatgggaacagagggtagagatcatttgctccattgtagaaatttggaactacagttgaccctcgaacaacatggatttgaactgtttgggtcacatacatgtggacttttttcaataaaagcacctgtccctcttgcctccctttccacctcctccacctcttctacctctgccacccctgagacagcaagaccaccccctcctcttcctcctcatcctactcaaagtgagaagaggatgaaggcctttatgatgattcacttcttaatgaatagtaatgattttcttaataacatttccttttctctaggttactttagaatacagttactttagaatacagtgtataatatatatataatatataaaatatgtgataattagctgtttatgttatcaggaaggcttctggtccagagttggctgctactagttaggttttggaggagtcaaaagttagacgtggatttttggctgcacaggatgtctacactcctaaccccaaccttgttcaagggtcaactctaatgggaagcttttgcagccattaactttcagtgatttcagtacacgctaaactggctttttaaaatgagggaatatataagctcatttaacaggaaatttaataaaagctggttgatccagtaccccagtgttattacctaggacttaggttctctacatttcctgtctttgctatacacatggttgacttcatttttaaggctggttcccaccagaggacaattgtggattcatccactttcattcaaatctggggagagagcgggagaatagcttgttctttagagcaaggcagaactttccaagaagtcttccacgaacctcccttcacatatcattggccagaactgagtcacaggactttttataaacgaatcacagacaagggggtatgagctaacccttaacccaatcagagttactcctgaagctgagggtattccttggagtcacatggactacatgaagacagggcacttgaacaaaattgaggttctattaggaagaaaaactgaggttgtaagtgctatgtaagtagttggtgctcagtaatgctgccatcctgtcttaacttagctaacaggactaagtgacatatttctgaggactctgatactaaatggtgtaaatatagggtagagtttgatttttttagttttgactctttctttaaactgactgtgaaacttcaggaagtcaagttattgagcccttgttttcttacttctgaaaggaaataaaactgtataacttcgggcaagttacttacctttacaatgtgtcagctttctcttttgtggattccttatctaaagtttaatagtactttactcataaagttgtattagttttctaggttttccataacaaagtaccacagactttgtggcttaaacaacagaaatttgttttctcatatttggaaagctagaaggccaaaatcaaggtgtcgacagggttgatttattctgaggacctttctccttggctcgtagatgaccatcttttctctatatcttcgcctgatcttgcttctgtgtgtgtctgtgtcctatctcctcttcttataaggacaccagtcatattggattaaggactactttaatggcttcatttcacatctttaaagaccatatctccaaacaggtcacattgtgaatactaaaggtgaggacttcaacatatgaatcttggggtgatacaattccatgcttttgatgtaagaattacgtgatttaatacatgttaaggatgtaaatctatatagtagatgcatactcaacattagttataaaattatcttattttcagtagtagcaacagatataaaaacaatagtatttgaagtagtaatagcatcactagcagggataatagcagaactgtctgagagaaaaggagaaagaatccctatgcaaggaagggggaagatatactttatagagaaatgagacacaagagaatagtatttgtttcacactcttccagctactatggctgtgtaacatagtatgtcaaaacttactggcttaagtcaacaacacttattttcttcatgaaatctgcagttttgacaggcccaacagggatagctcgctcaaactgtacttgtcatcagctggaacgttcagagtctcactcacatgtcaatgccagctgtcagctgggacctcagttggacacgtatgtggggcctctccacatggcctgggtttctgcacacattgttgctggtctccaagggtgagcatcctgaaagagaaaaagtggaattgtagtgctttttatgacctaacttcaaaagtcactaaaaattcctttggttgcattctactcatttgaggcatttataaagactgtcaaagttcaagagatggggaaatagactcttccttttgatggagagtgtcaaggtctggaagagaatatgggactgcatttactgctgtagtcatgtttggagagtataatcctccattcatacctaacttcccacacgaagcttctctttctggagcttactttcaaacacttgggtttgtgattttgttccagatcagaattggatccttatgctatgctacccaacttccagagatttgaggataaaatggcacatttggcagaaaacttttgagaagatctttatcaaagagggaactctctaaataaaggttcagtgtgcctcatagttctctttcaaacaggaacatacagaaagggggttgacattttgatttcccagataatcttttgtttttatgattttggatataaacatgtctcagacctgaacaaggaactcagatttttatccttaaaattaaatctgaagaataaggagaaccacatgcccttatcagctttaatattctaagaaaatgagaaaaaaaatgatttaagaacatttaaaagttgtgcactgggttcatcaaagattctcccattgaagagaaaatctgagctgtttcttgctttatatttgaatgctgtgcatggttttcatgatggcaataataatttactgcaaaatgcttttattgagttgcctttactgaagaggccctgcatgccttttcaccagcttgctacaattaaaagcagcagtaaacagagcctttctatttagactgaaaagcaatgattaagcttacccagctataaataggaggcagcttcacatctatggccccaactgcacacattaaagactccagctccaaatgcccccaatttatttctacaggacaaaccaataaattgtcaaactctgaccttaaaagtgacaatttcttaaaaaatgaaagtaggtaaattatgcataattatagataattactgagatgtctatgaggccaggaaatcagtacacatgctggaaatctaaatttgcacgctgatagcttctccttttaccattatcaaaccatggtttgccttgagcagctgtcagagatggcttttctttgcttgggggcacagaagaaaataagggacttaagagagaagatggaaaatacaaagttattttttaagattcccgttagttcaagtgattcagcaaggaaaccagaatataggcagttactgttaaacgtttttgaataaaaatgtttaaatgcaagccatttatcccacctataagctgtagctatctgagtgtttagagatttgaaggcatttgattcaacctcctcactttctgcagcaggaaactggaggctaagaaagccctgtgaattgtccaaggtcacatggcttgacagcagccgtgctggaactcagtagcttttctgactgtcactgcagcatccactgaatggaaaaatttgttccctttttattatttttagtataaaaccctagattaatgagatctaagtcataaaagtccatagggtgctgtatttctttgagtgcaagacaagcttgcaaaggtgacaggattttcccacttgaagaaacgtggtcccctctgcctcagcatcctccatctgagccaagagttgccaatttccaaaagcccaagaaagtaagtttccaaaatatgtcttgggtgatcgtatcttttttaaacttgtgagtcctcttcatttcgtgtttgcatgtggcctttgtctcccagtgattttccaactgcccatgactccccttgggtcatgcgctggatattctctgttgccttctgtcaccttctcaactctgtgcccaggagactggcatttatgtatgtatcaatgtcaccctagtcctttggctataatcaggctgagctatcaaggatactaacagaagaccggatagcagggagataaagaagccacagtttctattcccccagttcacttcctgcagaataaagcacagttgcccagctgagcccagcccacattaccaaaccccagaaaaattagtgagaattaacaactgctgtactaaactactccatttttaggagtttttttaaaattcagcattatctgactgatacaaaatatgacacctgcaaagaatttaagacaacataactaacttgaaatagagatcaatagttctgagacccagaaatggaagtgaactcagactgggattgagtttgcagattcacttgactccacgtccagaagcaaatggagacatctggggccctgtggggtagcaaaactaaaagtatcccatgggaagtaagagattcactcttcaaactcattgcttggaactagtaacaagtttgaggttctctcatgcattaaagggggctgaaataagctcttaaaaccaccgtctgaactataaaactggatagcagggaagccgtagaaaataaagtcttttatcctgaacttaggcttaactgctgacttggtagctgaatgtgcgaaaacctcaatttcagtgcattttgggagccttgagctaccaatataagacctggtttttgactaaatgttattgagaaatggtggaagaagaaattaaatataaatctgcaagactgtgagacataaaatggcggagagagaaagagacagagagagagagagagagagaaagagagagagagagacctccattcaataataaaattccaaaacacataaggaagtaatgctaagaaagacagcaacaaaataaactaatagaactgagttcactccagatgaaatggaaataataaaatagactattacccactagtcttcactaaaataactgctgaagaatgtatttcaggcagaagaaaacaccctaagagatatagaagaatggagcggaatgcagaaacaacagtacagaatttcgtaaaatatgatgataaatttaattaactattgactcttaaaaagaatggtatttttcacatcatgagataaaattcaaataacaccaagaaagacatagatgggaaagatattatgtgtgtaataaaagcatacttagttattgggttatttgggagaacagcagagatactaaatcacttaaattctgttcagaattttttttacttaaaaatgttaaaatgttaaaactatcaatcaaacaggaagaaagaaaagaggtaaaataagcaaaaaaaaagaggatggtaaacataaaatatataataactaagtccaaatacagcagtaatcaaaataaatgtaaaggaaccaacttacttataagagcaagattatcaggctaggtatttaaaaatccaaccatatgtagtttataataaacacacttaaaacataatggtccacaaaggttgaaaataaagaaatggaaaaaaacaagtaattcaatcactaaccaaaagaaagctgatatggcaatatgaatgtcagatggcactggatctaggccaaaaagcataaaaagagacattatgtagtgataaaaagaacagtcctggccaggcgcggtggctcacgcctgtaatcctagcactttgggaggacgagaagggcagatcacgaggtcaggagatcaagaccatcctggctaacatggtgaaaccccgtctctactaaaaatacaaaaaagtagcctggcgtagtggcgggcacctgtaatcccagctactcgggaggctgagacaggagaatggcgtgaacccgggaggcggagcctgcagtgagccgagatagcgcccctgcactccagcctggatgactgaacgagaccgtctcaaaaaaaaaaataaaataaaaaccagtcctgtatttgaatggctaagattatggcttgaaatataaaagaaaaatgctgacaaaattacaaaacaaaattgaaaaatctactatcttgtctgagattttaaaacacatatcaaaagccagcggagtcagcagaaaacaccaacttgtattaaaaagctggaaaataataaacccactttatagatgtagaaactggggcctaggcaagttgagtgattcatgcaagatcacaaagtttgtatgaattcaagccaggactaaaactcacactttctaaatagtaatcctatgccctctccattttataacattaacacatgtagaataaactgcgtatctgcagaaatgattagccttttctatgtccttaagagaatccttagtgtggtagcatatctgtcaatgttccactcggtttaccttgaatttcttttactttttcagtgtgccttttcttacctcctacatattatgtttctaattatccatctctgtgattctctatggagaaccacccttaggccaccggggtgtctactgtgaaacagaagttcctgggatgttatgccctcaatcacggcccttattcaatgactgaccggtgtgggaaaatggaagcccagctcctttgccttagagtttgaacaaatctaaggtataattttcactccgaagctcccccgtgggatcaggctgaggctgaatctctgcttggcttcttcccttatctttcctgctttttacacccagttctacctcgaaaattttcctcaataaattgagttgcatgtgatttctcatctcaaggtctgcttctgggaaccctttcctaaaatgaggaccatacagctctgtactaggagtaaaaagagagtagaaagtggttctacagaaaaccaaatacagcatgttctcataagtgggagctaaatgatgagaacacagggacacaaagagggaaataacagacactggggcctattggaaggtggagggtgggaggagggagaggatcaggaaaaataactaatgggtactaggtttaatacctgggtgatgaagtaatctatacaacaaacttctgtgacacaagtttacctatataacaaacctacacaagtagccctgaacttaaaaacaaacaaacaaacaggattattccataaaagtatgttctctatttaaaaaaatttgaagtaaatgaaagtcacccataatcccactatttgtaaggctattttggtcatttacctaagtatatatactgtacaagtaaaagtgtgataatgccaaaaaaaaaaaaaaaagtagttctagggaaagaatatttgagtggttaaggtttcctgctgcttttatctttgggaaattccagtttgatttgggcactaggaacctggcatagtgaatgtagtgtctgccaagctagaagaacactgctgcaacttcagacttcaggtcaattactattgactggccaactttctgtcccgagcataccctcttgggtccaattccagattaataatggcccaattccaaatctggaggattcctggcctctctctctctctctctttcaatgcagttgcttacttcccttaagactggctctgaatatacaagaaggcaactccgggattctggcctttaagatgcaagaccatgggtaaccatacaagcaacatcatgggctttccagttggttgagccattatttcagcctctactttgtatctcatagcttcacatttctttgctttccaagtctggatttagaggtgggccttgtctagaaagccaggtctaccttttttcaggcaaaaagtttcattaaccactgtggcttagaataatatttatgtaataaaatatttactaggtattgaatgcatgctatatgccactatacagatgaagaaatggaagtttagatctgaagattaacttgcccagatttatgtggccagctcttgccacaaaccaaccaaggatttagtgagtcagacatgagcctgactctgcacgtatcctacaagtcatagcattccctaccctggttttgctgaccccaggctctagcactggatttatccttggttctcttactgagtgctctagtactttcctagttgagcccctgacacccatcctctgtcaactcattttccccaggagctgacacctgctcctcaaagtatgtcttcaacttctacctgccatttttcacagagacacatggagaatttgccccaaatacacatctctagggactttctgcttcaatgccctgccctcctcctgccagactgaaccatggcaatggggcctaaaattctcaatgctatcttaggttgggttccccagaagcagaacccaagaaagggaaaatcaggcacacattgcttcagtcctcttgaggaaagactctcaaaagaagcatctaaaagaagaaaagcagacaggacaactagggtaagaagccaagcaaagatgcgtgctcaggaaaaatctaaacctggcctgatatgagagaggatctggagcataaattacaacactgacatgatggtcctcatcattaagacaaggtggttcgccttttgtactcctgtatcagccagtcattgccatagacttctcctgataaaaccatttagggagtgtaactttctgggcattaacttagggtgatacttggggaagaggacctctgttagcttttagcagtcaatacagcagctggaggctagagcccctgctcatccaccagcatctactacaagtgcctgggccttgggcaatgaacgtgggacttcagcaatcagatcccttttctcatcccaccttcctgctcctggcctcctcctactccccatcatcctgtgtggctggggcccccccatgccatgtgcctatccacaggctcctggattttagtacctgctcagagtccactgcattggcgcctgacactttattagtgttctaaagctttgtttacagttaccaggactctctagatagcagcaaaaagtcaacaaggaaataaaactccaccagctggtgtatttgttggggataaactcaccacacaggaaacagctgggtacatgctcacaaacgtcagtaccttgctggtcccaaaggctcatctgaagttgcaagtttgaatccccctttccaagctggtctgtttatacgcactcctccacaccttcagttcctttacaccatgtgagcctcaggaagctgaggcagtaatgagctttgaagctgttctactgcctgtgacagcccacaggccagtcatttgatccaattgcttgatgctacctccagcagcctcttggcaaaatctctgccattatataccattgtttccttactctaaagctcacatcttctcatgctgaagtctatatgcttcctagtgtatgaaagtaacactttaatgtagccctgaagaaaactgtccagcccatctggacatctgccagtcactaggaagagaatagatttttcaggcacaaatgttagcatactaaggagtagaaggctgaaggccatcttcactgactttatagtcagtgcgttctttgttcagcaaaacttagctcctagtcctgagccaattccaaaatgctgaatttcatccttccactactttgaaagcatttaaggtctaatgaaagggattaggcctggaattggtgccagaaattaaaatgaaggcataatttgcatgttttgacaataccttcacacttacacccatgccatgctttcttaaacactcttgaaaatatgtgagaatcaagatttcataatccacttcttctggaatgccatgtagaaacattctcattttgctttctccctgccttctgattttactcacaggcttaataatcactgtaaggatggggtagccataaacagcagagcattgagctttagtgcactcagatgtttgtgtatttccccatttaccttgtatataaagccatgctaagattcgcagttaatgctggagctcaccttgaaaatagcaccatctttctcctgaagatgctcaaactccaggtagtaacctcaggttgtatcatagctccttcagggtacctcactgtttttaataagcacatgataaagataatgtcttcctcgattctagtggtatttcttaacaaaagcctaagctgcaccaggatgaggtgttgtaatattttcacaagtgttaaaaaggattactgctcttcctaatattggtcaatgtgcccagatggagactattgcttttgcgcataacgtctaagcttctttgccagcgcacaattgtttaagaaaccacttttcttgctatgccctgataatcttgcctcttgaataactcatttccatcaagagcaggacagaatcagaacagcatggacaaggataatctctaaaatgtggtttcaaatggagaagtatgatatggtttgtcagaggcctggaaggtgcacattgtttagtaggttgacccaaagccatcctcaagaggtaggatgggtttttttgtgtgtggtttttttttttttggtttgtttgttttgttttgttttgttttgtcttttgagacagagtctcactctgtcaccaggctggagtgcagtggagcaatctcagctcactgcaacctccgcctcccgggttcaagtgattctcctgccttagcctcccgagtagcttggactacaggctcacgccaccacatccagctaatttttgtatttttagtagagatggggtttcaccatgttggccaggatggtcttgatctcttgacctcatgatccactcgcctcggcctcctaaagtgctgggattacaggcatgagccattgcacacggcctagaagtaggatggttttaagagcactgcactttctttgacacttctacccctgagagtagggtctatgttcccaccccttgaacctgggtgggctttgttactgccttgatcaataacaaagtgcagcagaagtgacactataatttccaaggctgggtctgaagaaagtcatgtagctttttccttgttctcctggaacacatactctttgtatcttcagcctccatgtaagaaattttactgtcccgaggctgccctgctggacatactaggtggagagaccactaagagagagagagatgatcaacaagccttagctattcaggcatcatacatgggagcgacaaaagcttcaagatggcactagccctagctactgctcaactgtaatcacagagaacccaaggccagaaatgcccagaggagcctagtggaccccagaactgtgagagatactaataaattgttattgatttaagctactgtgttttgaagatgttggttccactgcaatacataatgggaacaggaggtgcattacacataatataatgtacaattcaacccaaaggactctcctacccaccactggatacatgtctatgagagttggcactgctgtgggtgcacagagccaaggccatgcctcacaagacagtagagtgggtggatgtctgcatgctatgatttgagaatgactcaaagtaatctccctcagggggctgctcaggtccctgacctcttccacagtaattgccttgagaggatatgcaatcttggaaacttgccaaatgttagaaatccccttgttcagtgggtttcaaactaagaacactcaggttttgagaagggattccaaggaagtacagtgaaagcaagccttctacagacacagtattctctctctctggcctcagagggaggatttcttcccagcctcaggggtggaactgacccaaggtgcccatcagtgcaacacattcttcttgccattgtgattggtatagggctggacacgtagtccacatcaggccaatcaaagtgagtatcaggacagtcccagggagttctgggaaaacaatgttctccctttttcactagattggaatttagaagtatagtactttgagagctgctagcaaccataggaaaagtggcagagaatcctaggaatggagtggaaagagaggaagtagatctcagaagagacagaaaaaaaaagttgatcctaacggctttcaacctgatattcagctgttcttgaagcagatctcccctggactattttgttatgtgagctcacaaatttattttgtttagtgatttaagcaactagaattttaaaaatcaatgtgtacatatatgcttagcttctcttggagtttgtgttttagcagtagaagaaaatgatttctgctgctaaaaacatgtttggaaatagctgatcttatcctagtgatctagtcctttttgttgtgcaaaaggaagtgctaaaatcagaatgagaaccatggtcacctgacatagacacaagtgatgatgatgatgatgatgatgatgatgatgatgatgatgatgatatccatgttcaagtactaattctgggcaagacactgttctaagtgctatgaatatattacctcatttaatcatctccaaaacattatgagatattctgttactatcaccatttacaaatgatgggattgaagtacagagaggataaatagcatcctaagatcacacagctagtaagttgtgatgctaggattgaacacagctgttctcttagccataccctacacccctctgacaaggtagagtgccttctcattggcccctaggttctgggctctctttccacgatgcctctattcttaaagcatgcaacccagaaggttcctgttaaatgtaagtgagagaatttctatcactgtggacctgcttccatcatctggtttgtggttttattctaaccacaaagtatatgacttactcatgtctgcttggttttgactctttactaagagtaagggaatgcagtgatcaaagggaaggaagatttttaacttaagttgtcagcttgcttctgcttccaaaaaagtttcatgcttaaaaatatggcaccatgctttattcttcaaaagaagaaaagtcaaattgtagctgactccaactccttgttttacttaggtggaggaagattccatctcagtgagtatgatttgttcctgcccacccctcagctcccaaaatggcccaggaagttgtatgcagcatagaatttgatgtcactgttatttggtcaacttgtatgatcattgttcagatttgtgtagtccctggaaagaaggtgcctctgacagttctctgtcattttggggtacagggcaccttgttatatggctgcttccccggggcctagtgtcaagcttctcttcgtgggtgttatatatatatcctattctaagaagatgctaaggtgtcagattggaagccaccatccctctctttgtctccattaatctccacctctctgcctttgctatttccgcccatcccttcctttcagtgaagaacacagatcccctcactgctctgctccattctttatagctctttgcatattgcatgggttttgcctaaattagaatggaccttaatagaactgtggggcttttaaacattcaagcatcacttattttaatatccccctaaataccttttgaaaaatctcttagaagtccaaccgatttaagggttagtgtgcattttaattgaccattcaatttcaaataaatgtggaggaaattacaaccctcttaacagagaaacgacaatttaaggagaatgagaccttgattgaaacaattaggaacttagaaaccagactctgatgtggtcaaagaaaacagcccaggaatttataaagcctgccttattttgctttgaagaaaaacttgaaaaccataaaacaaggtgagatgttatccaaaatttggaagctaatttaataaacagattaatgcagttagttttgtttggcattgagaaacattggttaaccaaaattttattacaaaaataaaataaaatagttagttctcacccagcctatggacttgaggcttagaagaaagacattttaatctcctgtcatctattaacatattttttatcaaatcacataatcagataaattcttttttttttctttttgagatggaatttcgctctgtcgctaggctggagtgcagtggcatgatctcaactcactgcaacctccccctcctgggttcaagtgattcccctgcctcagcctcccaaatagctgggattacaggcacacactactacgcccagctaatttttgtattttagtagagacggggtctcaccatgttggccaagatggtctcgatctcctgacctcatgacctacctgccttggcctcccaaagtgcttggattacaggcatgagccaccgcacctggcctcagacaaattcttgatcagatgggctccctaagaacactcttttctttctttctttctttctttctttctttctttctttctttctttctttcttttttcacatttttttcccgtaggttattggggtacaggtggtatttggttacatgagtaagttctttagtggttatttgtgagctcctggtgcacccatcacctgagcagtatacactgaaccctgtttgtagccttttatccctcatccccctcccacccttctgctaaagtctccaaagtccattgtatcattctttacttcgattttttgtttgcttgctttgagacagagtctcactctgtcgtccacgctggagtgcagtggtgcaatctcagctcactgcaacctctgccttccaggttcaaatgattctcctgcctcagcctcctgagtagctgggactacaggcatgtgccaccactccgggctaatttttgtgttttcagtagatacagggtttttaccacgttggccaggctggtcttgaactcctgacctcagctgatccacctgcctcagcctcccaaaatgctgggattacaggcatgagccactgtacctggcccattgtatcattcttatgcttttgcatcctcatagtttagctcccacatctcagtgagaacatagcaatgtttggttttctattcctgagttacttcacttagaataatagtctccagtctcatccaggttgctgcaaatgccattaattcattcctttttatggctgagtggtattccattatatatatatataaaaaactgggtatttgtgtgtgtgtatatatattatatatataatatatataatatatatgtaatatatataatatatatattaaatatatataatatgtataatttatatgtaatatatataatatatatattaaatatatataatatatataatttatatgtaatatatataatatataatatatataatatattatatataatgtgtatatatatataatatatataatattatatatattatatataatgttttatatatatataatatatataatatatatataatatatataatatataatgtgtgtatatataatataatatataatatataatgtgtatatataatatatattatatatataatgtgtatatataatatatatattatatataatgtgtatatataatatatattatatataatgtgtatatataatatatattatatataatgtgtgtatatataatatatattatatataatgtgtatatatataatatatatattatatatataatgtgtatatatatatatattatatatataatgtgtatatatatatatataatatatatatatatacactgagattttttgttttgttttgttttttgagatgaagtttcactcttgttccccaggctggagtgcaatggtgtgatctcggctcactgcaacctcccccaccgggttcaagtgattctcctgcctcagcctcccgagtagctgggattacaggtgtctgccaccacacccggctaatttttgtatttttagtaaagacgaggtttcaccatgttggccaggctggtctcgaactcctgatcttccggtgatctgactgcctcggcttcccaaagtgctgagattacaggcgtgagccaccacacccagcctggtttttttgttttgtttgtttgtttgttttttgtttttgggggatgaaatttcactcttgttgcccaggatggagtgcaatggtgagagctcagctcactgcaacctccgcctcctggattcaagcaattcttctttctcagtctcccgagtagctgggattacaggcacctgccacgacacctggctaattttttatattttaagtagagatggggtttcatcattttggccaggctgatcttgaactcctaaccttcaggtgatccacccacctcggcctcccaaagtgctgggattacaggcatgaaccatggcacccagcctataccagctttttatccgctcgttgattgatgggcatttgggttgagaacacccttttctatccgtccatttcatttatttcccatttcaaaaattactccataaacgtgatcatccccataaacacaggataaacacttgacaaaattcagtgccttttcatgataacaaatagtaaagaaggaaattttcttaactaataaaagtcaatacacaaaattcacaggtaacatcatactacacaaaattgaaaagattccccactaaaccacgaacaagacaaggagggccactcttaccatttctattaaacattatactggagctcctagctggggaattaagcaaaaagaagtaagaaaaaatggaaataagtaaatgacatccagattgggaaggaagaaataaaatcatgtctatttgcagatggcatgatcttctatgtagaaaatcctaaaaaatccatgcatacacacaaaaagctattataactaataaatgaattcagcaagactacaggataaaacatcaaaaatcaaaaatcaattctccttttgtacactagcaatgaacaacccaaaaatggaattaagaaagacatttactttataataacaccaaaaagaataaaatacttaggaaaaaatgtaagcaaagaagtgtgtggtcatttattttttatgtcctctggactaggccttgggctacccagacatttgttcaagcattattctaggcatgtctaggcatgtttgtgagagtgtctctggaggaaatcaacatttgaaccagtaggcagagtaaagcagattgctctccctaacgtgtgttggtttcaacgcatcaactgaagacctcaacagaacaaaaaagctgagtaaaaggaaattcctgcctgactacttgagctcgtcttttctggcttttggactcaaactgaaacatcagctctcctgggttctccagcttgctgactgaaaatcttggaacttctcagcctccataattccatgagcgaattccttataatcgattattctttcttacataggtacatatggggtgtgtatatatataaatatatgtatatatatacacacatatatgtatacttctagttctctttctctggagaactctaatgcaagattataaaaaaaattactgaaagaattcttaaaatacatacataaattgaaagtcattttatgttcatggattggaagacaatattgttaagctagcaacactccctacattaatttacagattaaacccaagtcttatcaaaatctcaactgccttgcttacagaatttgacaaacctatcctcaaattcacatggaaatgtagtaaactcagaatagccaaaatagtcctgaaaaagaggaataaagttggaagacttacactccctgatttcaaaacttactacgtagctacaggaatcatcctgaatactttgtactggcataaggatagttatatagatctatagaacaaaattgagagtctagaaataaacccttacatttataatcaattgattttggacaaagatgtcaacaaaattcagtgaggaaagaatagtctggtgctggggtgactggatatcctcatgcaaaagaataaagttggaccctacctcatatcatatacaaaaattaactcaaaatgtaggagagatctgaatgtaagaactaaaatataaaaatcttagcagaaaacctaggtataaatattcgtgatctcatattaagtgatactttcatatgtatgacaccaaaagcacaaatcaaaaacttttgtgtgtcagagaacatcatgaaataagtgaaaataaaaaaaccacagaatgggagaaaatacttgcaagccatatatctgataaaacacttgccgtataaagaactcttcaaagtcaacaagaaaatgacaaacaactcaattaacaaatggggaaatgatctgaatgaacatttttccaaagaagatattcagatggctaataagcacatgtaaatatcttcaacatcattagccactatgcaattataaattaaaattacaatgatatatcactttgtatcccttaggatgattaaaataaaagacagacagtaacaaacattggcaagggtagagaattggaaccctcatatattgctgatggtattgtaaaatggtgtagccatttctgagtaacagtctggcagttctttaaaagttaaaaatagagttactgtttgtgtgtgtgtgtgtgtgtgtgtgtgtgtgtgtgtgtgtgtatttgagacagggtctcactctgttgcccaggctggagtgcagtggcgcgatctcagcccactgcaatctccacctcccaggttcaagcaattctcccacctcagccttagaattactgtttgactcagcaattccacatctaggtaataatcaccaaaaaagtagaaacaaccccaatgtccatcaactgattaacagatacacaaaatgtggtatactccatacggattatcatttggccataaaaaggaatgaagtactggcttatacattctaaacatgaatgaaccttgaaaacattttgctaagtgaaagaagcccatcacaaaagaccttatattttatgattcatttatatgcaatatccagaataggcaacatcatagagacagcaagtagattagtggttgccaggcaatcggaggggagagaagggagatagcaaatgactgttagtgggtacggagtttcttttgggggtaatgaaaatgttcgggaattagtggtgatggttgcacaactctgtgactgtactaaacagtattgaattacacaccttaatatattttataatatatgaagtacatcttgataaagctgttccaaacactttatataatatatgctaaatatatattatataacaatataatcaatataatatatatctcatatttattattgtgtattatatattgtataaatgtatatataactatatagtataaaattataacaattggacatgttataattgttatgagccctatatatatctcctgttgcagcttaaaagctggaagtccctgaattcatttgaaacctaaaataatttccttcttacttaaatatgctgccttaacatcctttaaaggtctgagaattaaaacaaaacaatacctatcaaaaacttccttgtgactagtttatccctaagtcaagttgttttctatttatttgttttcttttggtttggatcagattggtttgtacattatgtggttaagagcgtctgctgggcttctagtactggccatcaccactagtagctatgatacagggaaagttatgtccctctctttgcccaggttacccatctgtaaaatgggaaaatttttgaggccatcactaaatatcagtagactaaaggactaaatgacctcttaaaaattcagggttcaagacaacctatagaatgggagaaaaattttgcaatctatccacctgacaaacacctaatatccagaatctacaaggaatttaaacaaatttacaagaaaaacacaaataactgcattaaaaagtgggcaaaggacattaacagacacttctttgaagaaggcatttatgtggccaacaaacatgaaaaaacgttcaacatcacttatcgttagagaaatacaaatcaaaaccacaatgagataccatctcatgccagtcagaatggcgattattaaaaagtcaagaaacaacagatgctggcaaagttgctgagaaaaagaaatgcttttacactgttggtgggaatgtaaattagttcaaccattgtagaagacagtatggtgattcctcaaagacctagtaccagaaataccatttgaccgagcaatcccattgctgggtatacatccaaaggaatatgaatcattctattataaagatacatgcccacgtatgtttactgcagcaccattcacaatagcaaagacagggaatcaacccaaatgcccatcaatgacagatgggataaagaaaatgtggtacatatacaccatggaatactatgcagccacaaaaagaaatgagatcatgtcctttgcagggacatggatgcatttggaagccattatcctcagcaaactaacacaggaacagaaaaccaaatatcgcatgttctcacttataagtgggagctgaacaatgagagcacatgaatacagggaggggaacaacacacactggggcctgtcagggggccgggagaagggagattatcaggataaatagctaatgcatgcagggcttaatacagaggtaataggttgataagcacagcaaaccaccatggcacacatttacacatgtaactgtattagtctgttttcatgctgttgataaagacatacccaagatggggcaatttataaaagaaagaggtttattggaattatagttccacatggctggggaggtcccacaatcatagtcgaaggcaaggaggagcaagtcacaccttacgtggatggcaacagggaaaaagagagcttgtgcagggaaactcctgtttttaaaaccatcagacctcatgagacccattcactatcacaagaaaagcatgggaaagacccgcccccataattcaatcatctcccactgggtccctcccacaacatgtgggaattatgggagctacaagataagatttgggttgggacacagagccaaaccatatcattctgcccctggcccctcccaaatctcatgttctcacatttcaaaaccagtcatgccttcccaacagtcccccaaagtcttaactcatttcagcattaactcaaaagttcacagtccaaagtctcatccgagacaaggtaagtcccttctgcctatgagcctgtaaaaccaaaagcaagctagttacttcctagatacaatgggggtacaggcattgggtaaatacagccatttccaatggaagaaattggtcaaaacaaaggagccacagtccccatgcaagttcaaaatccagcagagcagtcaatgttaaagctccaaatgatctcctttgactccatgtctcacatccaggtcatgctgatgcaagaagtgggcttccatggtcttgggcagctccactcctttagcttcgcaggatagaggctccctcccagctgccttcacaggctggcattgagtgtctgcagcttttccaggtgcacagtgcaagctgtcggtggatctaccattccagggtctgtaggatggtggcccttttctcacagctccactaggcagagcccccataaggactctatgttggggatctgaccccacatttcccttctgcatttccctagcagaggttctccatgagggcactgcccctgcagcaaacttctgcctgggcatccaggcatttccatacatcctctgaaatccaggcagaggttcccaaaccccaattcttgacttctgtgcacttgcaggctcaataccacatggaagctcccaaggcttggggcttgcaccctctgaaaccacagcccaacctctacattggctcctttcagccatggctggagcaaacggaatgcagggcaccaagtccctaggctggacacagcatggggaccctgggccgggcccacaaaaccacttattcctcctaggcctctgggcttgtgatgggaggggctgccatgaagccctctgacatgccctgtagacattttccccattgtcttggggattaacattaggctcctcattacttatgcaaatttctgcagcaggattgaatttcttctcagaaaatgggattttcttttctaatgcattgtcaggctgcaatttttccaaacttttatggtctgtttcccttttaaaactgaattcctttcacagcacccaagtcacctctcaaatactttgctgcttagaaatttcttctaccagataccctaaatcatctctctcaacctcaaatttccacaaatctctagggcaggggcaaaatgacaccagtctctttgctaaaacataaccagactcacctttgctccagtttccaacaaattcctcatttccatctgagaccacttcagcctggactttattgtccatattgctattagcattttgggcaaagccattcaacaagtctctaggaaattccgaactttcccagattttcctgtcttcttctgagctctccaaactgttccaacctctgcctattacccagttccaaagttgcttccacattttcaggtatcttttcagtagcaccccactcctggtaccaatttattgtattagtccattttcatgtcgctgataaagatatacctgagactgggtaatttataaaggaaagaggtttattggacttacatttccacatggtggggaggcctcgcaatcatgatggaaggcaagtaggagcaagttacatcttacatggatggcagcaggcaaaaaagagagcttgtgcagggaaactcctgtttttaaaaccatgagatcttgtaagacccattcacaattgtgagaacagcacaagaaagacccacccccatgatttgatcatctcctgtcgggtccctcacacaacacatggaaattatgggagctacaagatgagatttggattgggacacagagccaaaccatattagcaacaaagctgcatgccctgcacatgtatcctggaacttaaaataaaatataatacaatttttaaaatgaaaaatgaaaaaaattttttaattcaagattcagtcattaaaacagggacatatgcccaataaatgtatcatcattattttaatacttagcactctgttctgtggattcttaaaagtagcttatattttaaaccacttaggccttataactgggggaagattccgtcttatcccaaattgggagaatgcaggaagcatgaaggacaaagggtcaatggagttacaacctgtagacagcctgaaaaaccaaatttggggcatccctttgtgctgctctacaaatagccttcatttgcttttcctatctggcttcaagattaattgctaaacttggaaggaggaccttgaagtttgctcgtaaattttctgtgtttaaaaagaagagttttatcattaatattctggagtgagcatgagtcagggagagtgactcaggccatgttctcagaggtggctggctataaatccacttttgcagaatattaatctcccctggctcctttgaaaagttagcaattattagtagatggtgtgaaagagagtctttaaaagaggaatggtaagacaatgtcaccttgagtttcttccaaactcattgctattagagaagagaaaagctgttccctcaaacaaactttggagaggagttgtcctggcaggcacaggcagcaaaagcaagtcacaactccactagacggagcccccacagggactctgtggtgggggtctgaccccacattttccttctgcactgccctagcagaggttctccatgagggcgctgcccctgcaacaaacttctgcctgggcatttagatgcctaaaacttaccgcatatgtgtactgggtcccaaaaaaaaccctagtaccttcaaggaaagataaggtttcatgaagcaatttgactcaataattaattgttcctacccggtgatggaatacctaggttgccttgaaaatattaagccaatcatttggagagtttgaatctcttgaatgtaatagttaaaggtagataatatttatgtctttgggcaagtgtaaacagggtcacagaattaggggattcaagaaatggacattgaagtatcaccacccattcaaagcccttgcctgaggaagggatacattgaaaccacaacatactggttttttttttttcctttcctgtatatttatattagttggctcttaaaatgtggtgcccagaaggcagcatgggcatcaccagggaacttgttaaaaatgcaaattatcaggcccctccccagacttactgaatcagaatctctgaggttgggactcagaaacctgtattttaacaacccatccagatgattctgctgcttgcagaattactgctctaactacagccagtaacagagctacttttaaaaagcaagtgattataacagttgggactattgtaggccgaaaaaagaaaaagaaagaaagaaactggactacagtggtctaactaaataagggtttatttttttgtcacaagaagaatggagttcagctaccctgggctgattctgcaaaaccagaatgtcatcgttgtcccaggctccttctaccttggtaagtggccttttccctcaggttcaacacttcaaggccataagacagctgcttcacctctgccatgttcaaggcaggaagaagaatgagaagtgcaaaaggtaaaaggtacatgccagctgggtctctccacttctaaaaggctgcctggaagcttcagcaagtgaccaccactcatgtggcataacatacaaaaacattaatcaaatatttcatcatcagggctggaagggacaataggaaagtacaaagagtttaaaaagagtggttaaggccaggcatggtggctcatgcctgtaatcccagctctttgggaggccgaggcaggcagatcacttgagctcaggagttcgagaccagcctgggcaatgtgacgagaccccatctctacaaaatacacaaaaagttagctgggcatggtggtacatgcctgtattcccagctactcagtggggctgaggtaggaggatcacttgagcatgggaggtggaggttgaagtgagctgagatcacgccactgcactccagcctaggcaacagagtaagaccctgtctcctaaaagtaaaaaataaaagtaaaaagagtggttagcaattgtattgcataaggtctaattttggtaaagtgtgcttgattttattttggaaattattcttcttaagattgaaaatgcaacatttgccattgtatttacacctttctttattatttcttcatcactggatgatttttactcttgataaaagtttggaagttgaattgctagcaccaactgtaatatcggtgtgtaatgctgggccactgtagttgaggaagatggctcatgttgtcttttcttgactgacttcattccacttaattatggaattttgttcatatcttagtgttacttcctggccagaaatttttattttgcaaacaagtccaaacagtaaaatctttattacagagaaatactcttaagtccatttactttgatatatacatctttcatcagctacgtttttcttcttggcagctaaggtttacatttaatcaagaaaatgtccttcttgcacttagagtaggcaccctcctacccagctctgcctctagtcccaaaaaagccatctgatgctcactactgcctgtcaaacatcctaatggattattgctcctctccatcaacccccatctgaggacctagccagcagaatgctaaaacacccaatccacacaggcaaaataaaatgatggggggagcaaaatctggaaacttggtactcagagtagggtcttccctccaggagcatcagcatttcctggacccttgttggcaatgcagactcccagtcatcctaaatctgctaaatcagaacccacattttaaaaagacctccagtggtggttgtgcatcttagtttgaaaagcactggcctaaagcagtggttcttgaaatattgctctagacatgcagcataatcatcttctgggaaactgtgagaaatgcaaaatctcagtcccatcccagccctgttgaatttgacactttaggggtggagcccagtaatctgtgttttatcaagccttccaggtgattctgacataagccaaaatctgagaacttcccctataacaatggtagtcaaccttacttatacaaagaaatcacctagggtatttaaacattacagctgtctcctatcttaaatatttctgctcacaggaggagtgttttaggtcaaatttcccagaagagcaccaggaaagaccacatctatgtctagccccactcttcttcctcctctgtcacataacacttaacaagaatccacatttcagactgttccttatgagctctcccacactgccacacatttgtttcaccaggcaagatgaaaacagcctgctgagccccaaaggaataaagcatggaagacgactggagaacacatttgaccgctttgtagggtcagtatcaggggctgcagcctaggaggcctggataaatgctgctttctacatagacaggttgtggaggggaaaagacctgattctcaacaccattgtcttggcgcccctgccacaggtagtagattaattacagaaaaataaatagtcctgatttcccattcctccttgtatgcacactctttgcaatgtgattttgtgattcttccaatccagaaatagactctgtttccctaccagttgaatctgctctatgacttgaattcgccatagaatgtggtggaaaggatggtttgccagttccaagcctggcctccgcaggcttgaacactctcctcttcctctccgacccttagccagcaccaagtgatgatacccagacaaactagcgtgagagacttgtgccccagtcatgccatcccccccaaaacagccagctgaccaccatacatgtgggcaagaccatcctggagcagcactcctctagttgaccaatgactcccatatgagcccagctgagaacaacagagaagggcccagggcaaaagggtcacacactgacctgtaaccttgagaactaataatggctgctatttgaagacactgacttttggggtgccttgttaggcagaattattgtgacaacagttcaataatacctcacaactttcagacctttcctggagagacccaaatatgggacagaaacattaaactacaaactacagacagctctgcacacctgactctgggtgtgaggaaatggaccacggagaaggcagaggcattggtggtcagggaacacagcactcgagacagagcaggcttagagctcagaggggctcgtgagctgcgaacagcacagcctgcagccttctgtgaagtcacacggggaggaagtgatgagaaggcaggttctatttctgttatgtgatctagaaaaagtacctgggaagccagcagggagccaatcagggaagttgactgatggggccaacatgggcttccgtttttatgaaagatgtggaagagaaagagagaagggcccagaagtgtgagatttgggggtaaaattagaactaggttttttttgtagctttaaattttttctttattgaggtataacaaaaatacagtaaattggctgggtgcagtggctcacgcctgtaatcccaacactttggaaggccaaggtgagaggatcacttgagcccaggagttcaaggcgaacctgggcaatgtagggagaccctgtctctacaaaaaattttaaaattagctggacatgcatacgcctgtggacccagctactcaggaggctgaggtgggaggatcccttgagcccaggagttcgaggctgcagtgagctgtgatcatgccactgcactctaacctggacaacagagtgagaccctgtctcaaaaaagcaaaactaaaaaaagcaaaacaaatgcaaacgcagaacagtacattgcacagatcttaagagtcaagcctggtgaattggtggtgtaagctcccagatcaacacgaaaggctttgtagcacccggaagtctcccttgtgcccgttcttggtcaactcttcttcttcagaggcaacccctcttctaacttctaccactgcaaactagttttgcctgtttttgaacttcatataaatgaaatcatgcagtatgtgccctcaactctgttttttttttctgctcatcattttgcctatagaattcttacatggaggtgcatgttatagtaagatgttcttttttatcattctgtaatattccattttatgaatatactacaatttattctggtctactgttattagacattttgactttatgaatagggctgttatgaacattcttgtacatgtcttttggtgcacacatgttctctttctcttgctaaacctgtggcttttaatcaatccctcctttgttcatcaactggtttgagtaatgacccgacacccttggtccccctttcccaggctcagtaagaatctgcccctgaattcaaagcccactctaggagggagggcaagaggaggaaaagggagagaaagaagaaggtagctccagtgactacagaaatgatatcagttcttcctaacttcacgttttgtctctagtggctatctgaagtgcctaaaatgacattcattggaagtaaagacgtgaagattcctttagagatacaaatatgccttttagaagggtaaatacataaaagaatttaaatgttacctttgctggtccttcacaatgttcagattatcctttatttattagctcccccactacccagagtggcctccccactacttgcatccattacctaggagtttgtaagaaatgcagaatctcgggccccaccccagacctggaatcaggatctgcatttttaaaagatccccaagtaattcccgggcatgttaaagtttgtgaagccgtgtattatcccactgatactttatacaaaactctataaacagagagaggaggaataattgttctcattttacagatagggaaatatgacgcggaaaggtgaatttgatgtgccaagggcaccttgctggttctctgccaggggaaggtctctaggtggaggctctgttgattttctgaacacagatatttccattatttcacactgatacccactggcactcctaacgctttatcaggccaaccagcctgcctctctctagagagcagtgtcctaagggcatgcactgtgtaactttgtttgaaagttggcatgaggagccaccaaggacataaatgttgcagtgtggtaagtgggagtaaaaggggcagggtagaggaagggaaaaggaatgaggaaccccagccaccacgtgaaatggcccagaggggcttgggaaagaggaatgaaggggctccagagacgcatttcaagttcctggccttgctgtctgctcctcccttgcctgcagacaggaggtctgtgctgtgacgcagtctgttagagcctgttggcagccagcctggagttggcctgcacccccactgcagagctctcagctacgcagggagagtggaggctgcccagtgcacctttgctgggtactgcagagcatccatgccacctgcaccagagggaacacagctctgcagtaatgccagttagactgcagtaacccgagatgggtgtagctcatactgcagtaacccgagatgggtgtagctccatgcccttgcacacctgcagggtccgaggaccctgggtttttaccatctgtttctgcacccccctccaggaagcagctccaggttgcagagttgctctgcctaccctgaagatgtctggaggctccccattgaccctgagccccacgacggtcccacagccaggaagacgggctcagcacggctcatggttcagatcagtgaaactagattccatggcctcctttcaaatccagctggaggaggctgaaaaatacccccagggctctgcctgcctgtgtaccggtatgggaagactccaagaaaatgtacagcctcccccacaccacccccacaggcgccagacatcaaaggtatagttagcagtggccttccaaagccagtgtctgatttgtttcctaacctaaaaggatggctctaatggcagaggttttgggacaggcaaagggaagggagtaccactggctggtgagggagctgttcggggcaggtaaagaagcttgtggggaggtaaagctacaatgtgtagtgagctgtccccatggagtgtgagcccgatcaaccccctcagtctaaagaataggacacctgcctctgccttgtgcagcctccccggtgctcccagctgcccagtttgcctccataaatgttacttttctgccgtccatattaaatgttacccttccccagtgttcatagagagaggagacagatgcctttctctatgaaccgctgcagactgtattcagtcagggcctagttgtgtggcaagggcactgaatccaacctcccagcagacaaagccatgcaagaaggagggtcaagtttccaggcccaggttaaaaatcgttgtgagtgtcaggtgtatgttggcaggtgatcagaggcggggaaaggaggtggaggtccctgaaaagcatcagccaaaaccactgcttagggattaacagcttttcaagcagcctgggatgtccttctcataaggtttgccagaatggatgctactcaccttcttccctactccctgctgtgtatacctgtacacaacatccaaagcaggacacatcagggaattcaatccaaaccctatcacgacagtggaaattttaaaaaatcttcatgacagaaaaggttcagtgttggatgtcacatggcaagggtataaaagagttaattcagataccatcctatctgaaattccatcgttatttttcccacctgtttaactgaagcagacagggcttaacaatctcgctcagatttcagtcttctctcactagtcacctagatactgacagttcactcatttattcgattaataattattgagtacctgtcatgcttgagtcactgtgctagtgagaaatcagtacactgtctaccatataggcattcacttattctacaaatatttattgagcaccacctgcttacatagcactgtccaaggtgctagggagggtacaaaggaagacagcagacaagccctcaagaagcttcagatacatgtggagaaacgtgcaagcccacaacgcagcccatttctactgtcaaagaaatggacccttgctacagaactgtggatctcctgagagcttgttagagatagagtctcacaccccacctgagacctgctaaatccgaacctgccttttaagaaaattccccaggaggttccacgcacattaaagtttgaaatctactgatctagacaaaagaagctctaaaaattcaggggagagagagattattgtgcacatcagtggtcaaaaaaaaaaaatccatgaaggagtttgcctttaaaggatgtctgggctttggccaagtatagagagctcaaggaatagtaatttcccacctccaatgagttaaaaaaaaatatgtctgcaaactgcggaaggcagtgacatttttcagacacattttccacaacagcaaaagctttgactcaggtaagatgagtctgcaaattcttgttgctgatgctatcaggatccccaaattgcaactcgcccagtttggacagcttcaaggtcagattacctgctgtcctgaaatggacaggcccaggaaagattcctggccttgtccaacccacctgtcagtcaagtagatcagccagtgagaaactggctcattattttccagcagttactcagccaattggcagtccccagcaaattgaattctggagtggcatcgtgtgaacatcggtgtggtggctgctttatcaagccagtccaacagagcagataaatcactgagaagttttgattagaggctgttggcaccaagactattgtttcatagtagatcagactgagcaggtgtctcagtttttcttacactcatccttcctgcattccatttaagaattaagatttttgctttcaatacaaaaattgaaataaatgaataaacagatctaaacatgactctactgttatctcttgtttctaactaccacccacaatgtctgtttgtccaacaattgaatccaaaaaagattgtacagaacttcacaattgcatagttatatagaaattctcattcaccattgaatgaactgcttacaattcaggcctgtagtctatggtgataaaatctgcccattgcttcagaagtcatgccagggaggatttgtcaggtaagctctaaagacaacacagcccaactcatttaccattgggccattattttccagaagcagggatgggtttgtgatgagccatctatactctctaacctccgtggccatggcttatgtttataaggcagctggcagggatagggaggttgggttgaagctgagtagcaggacctggctggctcacatgaagtggatcctaggactttgactcatcagctctgtcttagtcctgttaatttgatgcttaattaataacagggcattaacatctgctgtgaacatactgctactcatcaccctcccaaccctccctgccttctcctctcatacctgtctccaggaagctggacccacttatcagccaacttagtctctcaattattaccaaaaatgtgttttcaacttggtgcacactgggggtgtgcctgagcaggatggcgagaaggggcaggcacacactgagaagcgtagacatactcccctttatctaagggctctgctatttaggaaagggcttttgtgtgaggaggttcgagcctcaaaggctcatcttgtcatttttcctgtgcctttcagagatggagcatattgtgctgtgtttttgaaatgatgaaatgaaagtgtgaggaatctgaaagccatatagataaggagtggttgaaggaactgatggagctgagatgaaacgttatttcaaacgttggaggcgtcgtcgtgggaagaggcagcaggtgtgttctttgtggttcccgcaggtgggatataggttcggtagaaggaggcactttctcacaaagaaaaaccacccaacaatgggaggccaggccctgcttcctgaagaaggagcccccccatgatgacaggtacttaagctgaagctccacgactatgtataggagtcacctgcattataagcaaaagttggaatagaactcagcattcttttaactctgaaagcctacaacacatgcaaagctaaccttcacagagtagctcctatggtctcactttacaggtattatcccacttaacgcccacagcagtccaataagctaggtacagttattatgttttgttttgtctctttttgtcctcacttcggcttggaatgctcttgcctcaaatatctccctcctttcccattattctgatcttctcagggtactatttcctccccagtccttcccagtcttcccaaagaggggataatataaccacccctcccccatctctccatcccttacactgtttgatttgtctttatggcatttagcactgcctaaaataatgctgcaattgtatctgtttatgacctgtctcctctgggagaacagaaggacttggttggctttgctcagtgctccatttcagcacagagaatcaaggcctggcatagcgtaggtgctcaggacgtatgcatggaaggaataaatcagtcagttttacagatgaggaaacctaggcattaaagaggtaaagcaacatccaaaggccagacagtaagtaaagagaaggaccaggttgagagcaatttgactccagagttcacatatgtacagacaaccccctacttgtgatggtccaacttcacggttttcaacttatgatggtgaaaaaataataagcattcagaagaaacgatacttcaagtacccacacaaccattctgtttttcacttttagtacagtattcaataaattacatgagatatgcaacactttatataaataggctttgtgttagatgattttgcccaaatataggctgatgtacgtgttctgagcatatgtaaggtaggctaggctatgctatgatgtttggtaggttaggtgtgttaaatgtgttttataatattttcaacttatgaagggtttctcgggacatagcccctttgtaagttgaggagcatctgtaccccatttgaccctttgaaaaaaacatgtattctcaaagaaaagctgagacatccttgttaattcagtggctggtgctggctcttgttttatgacttcaaatgacttgtgcctataagcaggtggtcactggttgccaccaacatggtgtcttaaaaagcccattgagagaggtagagggcaaaaggcagagggcacaaagttaccttttgcctcaaaggtctgactgcacagtgatttgctgaatagagcaggtgagtcagaaaggtacagagaacagcttggcagtcacctggtcctaatctatccctgggcagatacattgaatctgacacagctcccgtgcctggagtcctcagaatcaaatttgcaaactcagagcagatttcttgcgtctccaggcgatttgaaaccatatgcaatgtcaccctttcaccaaaggagctgaatttatgttccttgttttctccctcccggtaaggcttggatttttccatgacaaaaatcttgttcatttgaatataaacaagttataaaatgaaatccacattgacttttgcagttaattaaaaagaatatggacttgaaaatcagactaacttgagttagaattcaggttaccactttgaatctccattttcctacctgaaaaatagaaactaacccttctcgcatggtttttgtaaggattagataaaaaaaattgaagggggcatctgccattgattttctcttctattgtcagagcattgttttccggctagacgccttctagtctttctgtagctgggtacaggaagaagcattgtctgaaggagttatcggtgtggaatccaaaacagctaaattgaattagcagaaagacaagggcattccagtacactgtggccagggaagtgctgtattcactcattgtttgcactcctgaggtcaggctttcaggtcagaccttgaaccctctgcctgcttcacatcctggctccttgggaagccactcctgtggcttcaaaggggcaaaactaagagaatggtggagctggaactttcatgaccagagcctgccctggccacatcctcccttggaacctacagtggaaagtggggacaattttgctaggtcacacctttttgaggaccttgctgggcttgtggatctgccagaaaattctttcttttttgagggacaaaagcctgctgctcagcagttttagattaagcctaatgagttctctcttgagatcaccattgttctaagcttaatatcatcctcattgacctagtggtatcaaattctgttggcatacctcttactaacaaaacacatcaaatatgtttttataaaacatgatactaaattatagaatataccaagaaatatgcttgtacagtgaatctgtgtgcttctattgctaccattaaacgtttgcacctacttctagctatcaccagaatgggttccactagcttctaatataaagtcctacacagctgtatctcgtaatttataaggtaaggtgggaaaatgcatctcaggtctcagctatctccagtgggaggcaggttctaccactttcaaggctcataacacaggaaggggtgttcaaaggtgcagggtaaacagaaagatggtgttcactgctaggcgtctcaaaatgaatgtgaatgttcatgcactcttatatacagcatttgaaacaaaacaaaacaaacataaaattaaacctgacatcttgggaatgagaaattctaagggtgcccaacatatagtaagtgctccctaaataagctgaatggatgaaagagtaaataactaggtagatcatggagcctctgatatctgagtaatacggaagtgttcataaaaaagggaagcctcagtgagacatataaatccaatgaaatatgttaagtctcaaaaagggagcagataattacttttgctttatgtttttcaatggagtaataaataatagaagaattctggtctcttctctggaagctgtcgtttacttggtgaagttttcctgttttttcctaataaatgatatcagttttaatgccgtgctgcccaaagataacatctgatatgcccttagagtcagttatacaaagaaatataggtttagctctgggcttctcatccttgaaactgtagacatttgggactggataattctttactgtgaggagtcgtgcattgtaagatgtttagcagcattccctggcctctaacaactagatgccagcggcatccctaccctatgtgataacaattaaaaatgtatccagacatcaccaaatatccctaggaggcaaaattgcctctggttgagaatcacagacttaggcctcaaaaatgggcaactcttagacaaatttgatttctaggctttttcaagttgtaaactaacttttctctaagcacagctctgccatggtatttgccttgtattcagttagggcctgaacaagatagtgatagagaccagagatctcaaaatgtgtctataagataagctgttacaccgaatgatattatttcagttaactatttacatagtcctattgttaacaaaccactctggaattcagtgatttaaaacaataattattcttatgtttctgggtttactgattggctggagccactcagggtctgtaggttgactggggcaattttgttccatgaatattatttttacacccaggtagaagctactagggagaagctcttctcaggatggaggaagaagcttccggaagcactagcagaaaaatgcactgtctcctgaggtcaaagaaggcactcggcacacactgtcatgtccgtccactactgctagcctaagcaagacacaaggtcaaggccaacatcagctgggcaggaaagtacacacttcccttgaagactggggcaaaggaattcatgaacgccaaagatgacattttcaatacaaccaatgagatggtgtcatgggtcttcggttctcactggctccatttctttaagagacaaagatggggaggtatcactggcgtttgagtcacgtttgcaaaacatattaagatcccagtgggaaaacgcacaacacagagaacaaaatttccatagctacatttaagaaatctgactattgaatcagtaggctggtggttttatttgttttattatgttttccggacccttggtaaatattgtcttaatttgggttaattacttttaaagggaacctcaagaatcaaggcaaattatttgatatttatttcgtattctccttccttgtgactagaatactaaataaatcactagcagcttgacaacagcagcagcctacaacagaggtatagaatcggtacttttgttctgccttcttatgtactctgcattagtcatggccatggtagagaattctgtggactgtttaagcttctgtgtttttctgaaggtatatagaggaatggaatgggtccaacagcaaaattattattagaagggaatagaaattgcccactagttgaatcttcaataaatatctaccgttgatttcattaactgatacatgtgaaagctaaaagatagttcaaatattcctgatacatcttcccagggacctgactgaggtcaaccccaaaattttaaggatgagaaacactgaatttaaaaaaaaaatccatacattgttcaagttttccttttagccataacagatcctaagctagatcagcccaggctttttagctcctaattccagaaccttccagcataccatgcttgcttaatacaataaaggaactgcaggtatttggcctaagggagataatagtcatttgggattttaagtaaataagaatctcttccatctggatgcagaacgccggggtctcaaattgggcaggcaaaaggcttattttgaggacaatggaacactcccctgtggtcccattcatggagatgtgggatgagaatgaaagtgaggatcttcagccttcctgacagaatgtccatcctgtcacctgaacctctgtctgccaagtacagtggggacttttcattcctgtgctgatttatagctttctgacatctgacactgttggcttcctcttcttagaaaaattccctgggaatttttctgatcccacttctctgatggctgcttgttcattatttttgcagtttcttttcttctggacttgtcctaattaatggtgttccctttggtcctcccctttcctcactccacgtgctgcccttagggtctagaattgtggctctcaaatcttcatccccagcccaagttgtcttttaagccccagagccacattctcaaccttctggtgcacatctcttggctcatgggaacctgactccacattcatgtctccctgtgcctgcccttcaaacaccatctccttctctggcatctccccactcagggagcagcagcatctactcagatacctaatccagaaactagggacttaatggagattccactgttcccaccttgcctcacatctaagcagccacaagctctgtaattctacagcctcagtatttcctaattatccccttcccttcattcgcagacattgtctgagttcattcacatcttgtcatttcttacctggaactgtgcactgacttcctaaccattccctaaacccaacctcagcccttcggccctccatccctaaaccattctccatgtgcccacaagccatcttgcagtatagagcacacatttttttctccttttttgttttttaagggataggttcttactatgttgtctaggctagtctcaaactcctggcctcaagccatcttcccgcctcatcctcctgagtagctggaactgcaggtacatgccaccatgcccggcccacaaattcttcagagagtttctctaataatgaataaattcaagttttagacagtaatctgatttatatcagcatttgtactctgagcatgggacatttgtttatttattccacattatttattaagtgcctattctgagcctgaccttggcaatagaatagcagtgaatattttctttaaactcattctcatggagcttaaaacttagtagggggaggcacacaatacaaaattaaatagatatctataatgaataatatattagtttggtgcaaaagtaatggcagttttttgccattgaaagtaatggcagaacctacaattacttttgcaccaatctaataaatcaatacaatatatattacgtgagaaagtgaaaagtgcttttgagaaaagcaaatcagaaaaggggagttgggagcgttgtgggggagggttgaaatgctaggcagggtctgaagaagacgacatttaaagaccacaagtgggaaaggagtgagctatgcggataacctggaggagggggattctgggtggggaacagcaagtacaaaggccctgagtcaggagtgcacttgtcaagtagaggaagtagcaaaagagaccgatgtggctgtaaagtgagaaaagtgacagtagccagcttgcatagcatcccattgccaatggttgcagcagtacctagaaagaaggccagcactgaaatctagtgtttttggctttctctggtatctctgagaaagtgtcagtctggcatacccattgtcagaacaatccacttaaataatatgtgtcctagtcagtttttgctgcgcagcaaacaactttaagtctcagttacttacaactacaagcatttgcttttctcacttatggatctgtgggttgggtgatcttggctgggctcaagatcttgggtgatcttggcttgactgcaggctgtaggttgggctcatgtctgcccaccttgcctctgagtttttcctgaaccgaaagacacattctatggtgatcacagaagaagaggcccagccaaacgatgaagcactttaaaacccctgctcattcacatgtcattggtcaaagcaagtcacatgaccaagaccaacatcaaatagatggagaattatattctacatgccctagggggaggcactgcaaacccacagcaaaggatgtggaagtataattctgcaatagtaaatgagtgaagaaacaagaccaatcatccagtatttcattatactgtagtcctgccttgaatctctacacacttttgcaggttagaatgcacttacacacgcctttctgtgatacctatttaaaagccttgtagatagtaggcactcataaaactgcttccttaataatgaaatctatggataaatgccttatttcatatgacccatgcaacaattagtgaattaaatacaaatatcttcattttacagatgagaaagaatctaaatgacttttcattcagggttggcagactcaaggctcaagcccaattctttgctctctaaagcaaaagacaaaaattccaacattacctcaaaattaagtttacagcaacatgaggcctatatttgattacagttgtctggagttcgaagcacattttgttgtaaatagttttggttaatctgacattttgtgaaacacagtaagggccacagtgagtttctgctgggtttaggcttctttctgagattggcctggctgagctaggcaggctgactgctcattcacccatttatttttcattcaatcaacatgaactgagtgtttataagaagcagtgtttttaaagctagggcttccactgtaaagaaaacagacaatcatggagctctttgaaaggcagacggtagtatatacgaagttggaagtggtaactactctgaaaacaaataaaacagagttggggataggaggttaaggggcatgatgaccaaggtgaagtaaacgaaagaggagaaagctatagtccccatggcagagaaggatttgtatagctggtaacaagaaggatcaactcaaagcaccaggaaaggaattggattaaatagacaactcttgtccagggttggtggcttaacctgcacgagtgtccccaggaatgcagcccccaccccaaaggcaacaaagaccctgcttttaaactgactgttggggtttcttcacttcctgaaactatttgaaagagtcatcattcttgattttctttcttagttaaaatttgaaattcaggttgaatttttaaaaactgagttctgtcctagaacttcagacagaggaggtcaaagtatctataagatgcttacatgctaataaaagatttcacaccagtaaagtgcattgaagggcactgttggtgggagtgaggttctgagtggtcttctcatctccccaccaggaaaataaaagaatcttgaatatgatttgcatagaattctgccataattcaagatatgacctgtaattttattgcaaatattgttgtttggctcccaccaagtggatagatgggagtagcacagaggaagggtgcagaaaggagagaaccctcagtaacaaggagaggttaggagaagagcctttttataatcactctgttctctctggaaggaagaacatctttgggaaacttgaggcaaacaatttccttgcatttactttgacaagtaccatctgttaatggcaaatgatcctggattttcatttacagtataaatacaaagtttccttttaaaataactttaatttgtaaagttagtacaggtggtatattcttggattagttttttcaacctccccttttctttccaagaggttggatgtcttagaattatactttccagacatccttgtggttaaggctctggatgaattctgttgtgccaattaaatgcagttgcatgagttttgtaaggcagaaagaaagtgaagcgagccttgctgcagtaatggcagctgattagtaagctttgtgagatttgagcacatgcaggagtcagactcatgcttctactctagtcgacggaggcagttattatggcagcaagagtggaaaacgtgaaaactgtggtttcttcctgttgacatggatagcaagttccactggtgcctctgacttccatactcttctcaccattttataagcatctatttccctgtattaaatcaccttctacttgaaatacctagagtggtttctcattattttattaatttaacacatgtggcaaaattgtgatgtggtaagcactggtctcatggtgacatgactagaaacacacattctcagaatttatacaaaggatacctgaatggatttcgaaatattacaatttggaggcaaagcaaagctggaaatgccaagggaaactcattaattgatgtcctattgccttaaaaaatctattcaattccttttatgaaatgtgttttcaattaatctaattgtcttggagtccttcagctgactgatttttcaactggtttggaggaggttttttggacattttggtggaatataaggaaacagagtttgtctctttgactaccttcatcacagagtaaaagctacatacttacctgaagccacaactccacgtgacttactatttcagttgacctagcccttgagcttctgaggaaagcagatgttgggctcagtgggtggctccttcaataaacatgaagaatggcttcaaaaaaagctacggataaactatgagtggttggggctctataccaatggctggggagggtgtgaggagaagagaaacatagcagtgactgctagccctgtgagatcttttgcacccaagaagtccacttaatttatcagggaggtcttaggaaaatttagctgcctcagaaagcctgaaagaagacaggtagagcacttgaaaaaaaaaaaaaaaaaaaacaagaaaatgtctagaagtatctgcatcatcagtaatgtgagcaaaggaacattttgaatactgagttagcaagtcttgctctagcgctgaggagccttaggttttaggggattgcataagcagaaattgcctcttaaactacaagattctcttttcctttttttgctttggtagaagatctttgttgttttgcttgccactgtccactctaccaacttttgttaatcatactccactcttcctttaggaaatactccctttccagctctcagcccatgtgaagatgggctgactggcctggcgtgggctgactgagtacatgacccaggcctggcaaactagatcattccatcatctagaccactctgattggttcagacatggtcacatgatgtaaacctagacaaccccagacaatgagcatgagtctgaagacttttgatggcaccatttgagaaaaggatgctctttttgttggtgtaaataaactggtggatgtagccttataactgtagggagacctccctgtgagaaaagctttacctgagaatgaagctaacatgaaggaaagatgaacaaataaatgaaaaaagagagatgaaaacagagacagagatagtcctttaaatgccatatgagccctggatccagccatacctgaagtcagaactactccctggacttagttacatgaaccaatggatgttcattaaggcttagatcagtttgaactgactttctgtcactcacaatccaaggcaccatgacgaatgctttaattgttctttttccacattaacacagtgctaattagagagcatagatctttattttcttcctttttctacaacccccacctccaccacccagaagtcttctgatgcctggttttatcctgtattcattcagcagacatttatagagcacgcaccatatgccaagcattgtccacaacaacagttttagaaaactaatatggcatagaccttgccattaaaaaattcagtcaatactgctttcctaaaatgcataaaagatcacaagttggtcattttgttttctccaaattttcagctttcaaaaaaaaatttaactctcaatttcaaaatgtttgtaactgttacccataaatttactttattgcatatgaatagtttaattttataatagcatcaattttcaccaaatttcttcatgtttttaatgttgttatcacatcttcaccttaggaaacttatttaagctctctgagccttggttttctcatctgtaaaataaacgggtagagggtactgatatgcctggtatcttctcaacctgaaattctgacagtttgctcacctatgttgactcctttcttcctttgaaacaattttttcctctgccctatagcaacttctataacacatatcccccccgccccccaaaccccagggaattaaatgcatttctcagaattcaggaagactgccctgctttcattcctaatgcctgtaacctgttctctatgaagcagccaaaccgatcattcccaactatatatgaaaccaaactccacattttccactcctatttaacatccagtggcatcctatcacccttgcaataaaatccaaactccttatctgatccctgttgatatagtttgaatgtgtgtccctgcccaaatctcattttgaaatgtcatccccagtgctggaggtggggcctggtgggaggtgatgggctcaagggggaggatttctcatgaatagtttgacaccatccccttggtgctgtccttgcagtagtgagtgagttcccatgagatctgttcatttacaagtgtgtggcacctttcccctctctctcttgctcttgcttttgccatgtgacatgcaagcgcctgcttggccttctgtcatgattgcaagtttccagaggcctccccagaagcagatgccagtgttatgcttccgcaagccaatgaagcctcttttttaataaattacccagtctcgggtatttctttatagcaacacaagaacagactaatacacctgcctttctcttcctctctcatcttacttcctcttctccctcttgctcaatatattccagccactctgccttgaatttgccaatcttgtttccctttcagagactttggtcttgctgctccctctttccagaatactttcttcccagatcttgacaaggttttcttccacacttcactcaggttgcccattcaaagatatttcctgactctacccgccatctaaaataacatcttactcccactcttttccatactttgttttattttcttctcagctcttatcacttattgaaattataatgtatcatgttataatgattctatcttatataattaacatttaatttaatataatttaatgtaaattacattagcatagagagtagcaaatagtagaggctcagctggctttgtggaatgaataattttactctaattctaataatagccatctgtttagctttgaggtatttatgacaaaaacccaccttaatcacaagccctgcttttaacatcttttgttcgaatatatggacagtttttttatccaagtggattttaagaaacttgaagatcctacaaacagacatcccttcttttgtgagttctcacagactgccattagctagtagaattgtaattatattttcagaaggaactgtatactctacagattgagaaaggtttttcttgcattcttaaaagattcagttaggaaatggcagaattggtttctaagacaacctgtaatgggtagcatctaaaacttggttcaccaggtggaatcacaggcaagtgctcagaaatcgtgacattagacccagagtttaaaccagaatgatgtgttctactgatgaggtctttctgctttttatcaaactcatcctatttggccatttgattctagaaatatggtccaggcaaaggtcacagtaagccgtacaaagtgttcccagttcattcagaaagaagctcatggaaactatctcagagtctttaagtgcctatgccccaggttaggagatcaaggacaagaaatctgggtgtaactcctggtgaacagaataaggctcagaagaggaaaggtcaagaatctccctcatatacatgtttactcaatggtaacaagaatgcaccagatttttcacaacagtactatttgtaatagccaaaaatggtgagaatccccatgttcatcaacagtagaatggataaattatgttggaattcatgcatagattagtgtacaaaaaatgagaatggatggtttacaactgcattgaatgatacagatacatattgttgagagaaagaagacagtcaaccaaacacaaaagagtacatactaaataattcagtctaatgttcaaaaaaacaaacagacttaattcatggtgtgaaaaatcaggattgtggttacccttagggagttagtgactagaaaagaacatgaaagaggcatctggggtactggtaatgatctagttctatattcgggtcctggttacacagatgtgttaactaccaaaattcattcagttgtgcacttataatatgtgcatttttctgtatttatttcatatttcaataaaaagtttactaaaaaaatttcctcatgtgttttagaaattttaagccaagaaaattaagagagccctcttttgcaagcactcacagattgatataccaactttcaaactcataagaagcatgtgttgaaaagtcgttgactctttagctgaacctcacaaaaagaactcatttgattctgaagatgtcacacaccctgagtttgtgaaaagagaaggtttggctttcaggatcccagagcatatattttccaaaatctcacactttccctcttggtcatgatcattcaccaaaacacacacacacacacacacacacacacacgcacacacacacgtgtgtgtgtatgtatgtgtgtgtgtgcataacatacatatacatacatatatgtatatatatataattatacaatatataatttaagcaattactgtcttgtgtgctgtattccaagcttttcctacattattaataaaaaattgtcctccatcttctagaaattttcagtctacctgaatgtttatcatatgtataattgaacatttccctaaagcataaagactcaatcaatgggcttctactgctcactgagataatcacctttaaaaagacaaatgttttttctgctagatctctttatcttcactgtgggttcctcttattttatttctacatcaatgttcatatttaacttattattttatcttatttttaaatttcttttatgttgagccttgatgaaagccataggttctctcatataattgtatgtgtatgtatgtatatgtacataatatatacatatatgtatatgtatgtgtatgtacataatatatacgtatatgtatgtgtatgtacataatatatacgtatatgtatgtgtatgtacataatatatacgtatatgtatgtgtatgtacataatatatacgtatatgtatgtgtatgtacataatatatacgtatatgtatgtgtatgtgtattacataatatatacatatatgtatatattatgtatatgtacataatatatacatatatgtatatgcatgtatatgtatgttatacacacactaattcccctacatctcacctgtataagccatttttttagttgctataaaggaatatctgaggatggataatttacttttttaaaaaaagaggtttaattggctcacagttctgcaggctctgcaggaggcatggtgctggcacctgtttggcttctggcggcagtttcaggaagcttaaaatcatggtggtgggaaaaaagtcctggtggaaggtgaaggggggctgatgtatcctgtggtgagaatgggtacaagagagtaggagaagggagagatcccggacttctaaggaaacacatcttgtgtgaactgagcaagaactcacttatcaccaaggggatggtgctataccatgagggatccgcccccacgatccaatcacctcccgccagtccccacttccaacattgagtattacatttcaacgtgagatttggaggggacaaacatccaaactatatcatgacccttccatctaccaccttttctaccatcaccaccaccagaaccctgaacccacatgctataactctgaattttttccccaccaccactatactttttggcaattttaatttgatttgattgataggaaaagattcagagatgacaaactcggaaggaaatggctataggcttcattctacctacagataaattttgtttggtcttcacaaggtatttgttaaatttctgaatgtgaatgtctttagactgggcaaatggtctccagttaactgtggttccccagcactttttgctatttaactcccaacatactacacttaggtttcccaaaatctcataccttccctttcttatattttctgccaagaatataagacattttgagttttccatctttgttgttgttgtttttacttttttatttcaataggtttttgggaaacaggtggtgtttggttacatgaataagttcttcagtgttgatttctgagattttggtgcacccattacccaagcagtgtatgctgcaaccgatgtgtagtcttttatccctcaccccccgctcaaccttccccctccccaagtccccaaagtctattgtatcattcttatgccttcacatcctcatagcttagttctcacttatgagtgagaacatacaatgtttggttttccattcctaaattagttcccttgaagtaatggtttgcaattccattcaggttgctacaaatgtcattatttctttcctttttatggctgagtagtagtagtccatggtatatatacatacatacatagacacacacacacacacacacacacacaaacacacacatatatatacacattttctttatccactcgatgattgatgagcatgtgggctggttctatatttttgcaattgtgaattgtgctgccataaacatgcatgtgcaagtatctttcttgtataatggcttcttttcctctgggtagatacccaggagttttccacctttgaattaatccttaggaatcaaaaaacattgcccttccccacttgcctactgaaggtcaaacaagcctcttctggggagcaaaagtcaaatggagaatatacatgtttgtgtgactgttgtccccatggtttagtgcttccaaggtaccagagttgattggttcattgaggggtatgtatgtgtgtgtgtgtgtgtgtgtgtgtgtgtgtgtgtgtgacagagagagagagagagagagagagagagaaagctagatctcaaccctactagggaaaggatcagatatgcttacaatgctccacccctgtaactaaaattgtctttgcataaaaagtcacaatttagaactccaaactactcataccacaacatacagaagatttactcaccaaaaatctcatgatacttaagaaaatattatctctaaacatgagccaagttggtgatgaaaaagaaaaaaaaaacacaaaaaaacacaaaaaaacaaaaaactccctgctaaaaatccaaacacttttgagattagcaagcgcctttagagtagaccaccagcattgcctttatggaaaactcctggaaatgaaaacaacagtcccttcatgagataattaggtcctccttcctcaactcaatctgaaaatattcatttagagaccagacagcctggtatcagaaattaaacccctgatttctgtggcgtctgatggttcagagttcatgattcttggttagctgcatcagtaactgctgtatggacctgtataaaaccacttgcctactctaagccttggtcttttcatctgtaaaaggtttgcaaaccaactgattctatttctaaaagttacttttggttctaaaatcccatattacaaaatgtgatattctatttcttaacctgggtagtgattgcacaagtatttgctttataattattctttaaacatatatgttttatacagccttctaaataagtaatgtttgacaatgtgttgaaagggaaaagcattctatcagaagaagccagtctagtaccattcttgaattcataaaagtaggtgtgaaaattaaatgtcagaggcaaaaagccaagagcagattgaagcttgtaaaactcctgaggcttcaaaccatttcagtgataagctagaaccaaagaaagtagaatgaatgggaacttgcagggcaagaaggactattataggctcatacaaatccccacaatggtcctaggaggaaattgaaatctaaaggctgttacttaatggccaaattcttagcgaaatgtgaccatggacataggagacactttcttctggtttacaataaggagcatcttaacattctcaaaatgacttgattgtaaaactttttccttcattgcatttatttcttttgccaagcaccgtgctaggccacagcaatatagagaaaactaaagtatgactgctttcaaggaacttgcagacttagaagcctctatgtcatttagaaaaaatttcaagcttattgcttctcctgagacctctgatctcttctaaaaacatcctactcccccactgctggactggctctctgatgtgcttcagaaagctcccgcctcaggccaggcatggtggctaacacctgtaatcccagcactttgggaggccaaggggggcagatcacgaagtcaggagactgagaccatcctggccaacacggtgaaaccccatgtctaccaaaaatacaaaaaattagctgagcatggtggcatgtgcctgtaatcccatactcaggaggctgaggcaggagaattgcttgaaccagggagttggaggttgcagccgagatcacgccactgcactccagcctggcaactgaacaagactctatttcaaaaagaaagaaagaaggaaagaaaggaagaaaagaaagaaagaaagaaagaaagaaagaaagaaagaaagaaagaaagaaagaaagaaagaaagaaagaaagctcccaccttagggcccttgtacttgctatatcctctgccacacagtctcttctcccacctttacttctttacttggcccactccttctcaccattcagacctcaacttaaatgtcagagatgattttcttgacttcccagttaaaaaaaatttcctcctcccccacctcagtcattctctacttcatttctcaaagtaatattcttccaaatactccatatttgaaagtatcttttgccgtagatgttttttaaaatgtatttctagtcttttttctctcaatatgaagaacttctagaagaccaaaggcaatgctttgtccactgctacatcccagggctcatatcagtgcctggctcatagtagttgcacactaaatatttttaaattttattattatttataagtgagtgaataatatgaggcaaactcaaaaaaagttttccaaatgacttttaaggttctagttagtcttcagatttatgtggtcctaagtagtgtcaaaagataaaagtttcagggagctgggaggtaagaaagaagagatgaatcctgatagcattcgtgccttctttgatggttgggatcatagagggattcacagaaggtgtcattagtgggagtaggaaagatgcatatagttattcaatatacagaaagagaggaaggcattccaggtcaagtgaacaacataagcaaaggcacaaagagataagaatgcacaaaaagttggtagaacagaagacaaatggaagggtagcgtaatttatgcaatggtcatgaaaagctttggactttattctaaagaagacaaagattcgaaaagtaaaccagcctcactcatctcatagaacaattagactgacagcagtgtgaggaatgggtgtgtccatgaacactttgaaattttggccaaaattgtacatgtatttgtgagcgtgtgatatttgggcattttactggggagagagaacctatggctttcatcaatgctcaacataaaagaaatttaaaaataagataaaataataagttaaatatgaacattgatgtagaaataaaataagaggaacccacagtgaagataaagagatctagcagaaaaacatttgtctttttaaaggtgattatctcagtgagcagtagaagcccattgattgagtctttatgctttagggaaatgttcaattatacatatgataaacattcaggtagactgaaaatttctagaagatggacaattttttattaataatgtgggaaaagcttggaatacagcacacaagacagtaattgcttaaagacaggaaagataggcaaattcaggtcctaatgagctaagaacggatagaaaaagagaaaagtagaaaccatacttaggtatgttctatgtgattcccacctctgcctcaataatccattctttcgtggtgggtttctctttcctgctaagcagttcctcccacacccctatagatgaacagtcaattctttggtcatacttgagccagatctctggtgatataattgccaaaatggcttgacatttaaaatatcagagatgacccagctgccctaagtgataataatgctattatagtgggggtagaaacagccccaaaggagagaagagtgggatactaatgataaagttcagaaaaataagaattaagatgagataatgaacaacagggagactcgatccaagtcaagtcaatggtcatctcaccatggggaccgattggagaaaaactgaagttaaataaggacgctggcaagagaagacaacaggcagtggagtcagatggcctcatccttgtagaagctatgcacacccatttgaagaggaggtagttggattaaaggaattggctctaattcagtaggaaaaagttgcaggagccaggaggctgaaagacgcctgccatctggagaaactggggaaggagaattggaagtcaggcagatcaggggtggggaaacggtaaggaagaaaggctatttggcaggaatactttgggcggggtcagcttctcccacgatgctcttaattcagggatgtaacttgcacactcttcagtagaagcatcagcaataaaagaaaataattttatttccaaatcctaataaatctatattttgaactgatatttaggaaaactgtcttttaatatgtaaatgtgtttcacatgcaatccgtttggaaaaacaccaaatctccaaaatctttaacagcaattctacaaagtataatatatttataattttttggttggggtaaaataaattataccagatttttcaagatatagaatttcttataggagaagcagaatgcactagaagtcattgaaacactggcaggactaagtagaaaaagttaaggttagtaatggttacaggtacaagctcttaaatgagaacacccaagatcacatcctggctccactagtttactaattgtgtgatctctggcaagttcataaactctataaacttcaatttcctccaccatacaatgggattagtgcccatgcaaggagttattttttttttaacttttattttagattcagggagaacatgggcaggtttgttacaaaggtatattgcgtgacattgaggtttggagtaaaattgaaccagtcacccaggtagtgagcatagtaactgataggtagtttttcaacccctgccccctccctacatttcccctcttatattctccagtgtctgttgttcccatctttatacccacgtgtacccaaagtttagctcacacttacaagtgagaacatgtgggatttggttttccatttctgcattaattcacttagggcaatggtctccagctgcgtccatgtcacctcaaaggccatgattttattcttttttgtggcagcatagtattccatcatatatatgtaccacagtttctttatccaatctatcattgatggacacctagattgattctgtctttgctactgtgaatagtgctgcaataaacatacaggtgcacgtttttggtagaatgatttattttctttggggcatatacccagtaatgggattgcttggttaagtggtagttaaactgttagttctttgagagctctcaaagagttattataaggattaaaattaaaaataataatgcttgtaaattatttaacacagtgcctcatatattttgggagctaaataattattatctgtcatttccatcatcattattatcagttaatttgagagccttccagaattatttgcggacagtactgatcaagattgtggtttttcatctgctcctgacttgctatataaacttcaccaaatgattcagctacaaaagaggaacagggtctatgtccatgttgaatctcaagaatttagatcatagacattattgttattattaacactctacttgcaaataggagcgttggtctcttgtgtcaactctacaacaaactcaccacagggctagacaagccacacatctgttctaggtctctgtttcttcatcagccaagatggataaattacacaatcttcaacgttcatctgagttctaacattctatgattctgcaactgctgtttcaaatgtggcacttgtgagttataaacaacataacttcccttcacctgcattggactacacctatggggactgaaagtgcagtatgtggtgggtatgtgaccttccacaggtaagagatgagttgcccttctctgcctgcatcctcacaagagccattttgttctgctcctgtctgactggctctccagtaattttctgcagcaagctctatccttatcccagccagtgagaggaaaatgaattcacccagcagtcctatgcatcccttcagatgttgcagggagaaagcacgccaggcatttcactgttaattatcagcagcctggctgctatggcaccttgctgtgccaatttgagagatgagattctttacactgcttattaggctcagctaaataaatattacccagcattaatgttgtcagagatacagtctgaattcagctcccttgagtggctgttggtacccaagcttttcaccatcaatttttcttcctgtacctccttcccttaccaatccaccactaatctctttctctcctccctggatgttcagctggattctgacatcagaggactgaaataatatcaccgatttagctcctttgcttaaggttatcaaatacttgtgctgctactagatttaagggccccattattagttactttgtagtcttgtcgtaacagatttcaaatttctgaagcatgtattttgagttagagcccgccctctcccccagcaaagtgagttttgaaagactgaagccctctggctacagcaattggtttaaaggtgaaccctaataaggccaatcatgcccccaaaagaatgaatttcaggatttattttagctatttaaaaaacagaagttttcttcttggctggatgttgaatctagaaaatatagccccaaggaaccactgttagctattttgcaaccatgaaggtaaatgctacccataatggagacgacatatagtaagtggtggaaagaattagagaaaagaaacccacacctgttaagagcctagatcaagctttacctaaagccaaatcaatctttggacatttcagtttgaatccttatggctctcatattatttaattctgagttggaaattctaatactttcagctacatagatgtgtttgttacaaggtctcctggatgtgtctatttggagcaagtgtaggtgaagccctgcccacatcacttcagatcttaccactataatgctctcctacctgaattcccactcccgagggctaactgtagtgattttgcttcagcacaagatagtacagaagtggtgggtaataaaacaccacaccgaggcagcccttaataaatgattggcagcagttggtgagtaaatatgccagcttctttgctcattttgtgtaatgctgagacacatgttctatacaagctctcagagttcctcagggggattgaccctagtttgtttgataacaacccttcattggctgccttcttttctctgtcccatttctctattggtttgttggtatcaccttctgagtcacttgtacttgggtccacaatgaatttatacaaagtaacatctgcttataccttttaaaatgcaccctacagggagtcacttccaagatggttgaataggaagagctccagtctgcagctcccagcgagatcgacacagaagatgggtgatttctgcatttccaactgaggtacttggttcatctcaatgggactggttggacagtggatgcagcccacagagggtgcgctgagcagggtggggcatcgcctcacctgggaagcacaagggccaggagattttccctttcctagctaagggaagccatgacaggctgtagttggagaaatggtacactcctgaccaaatactgtgctttttccacagtcttagcaactggcagaccaggagataccctcccgtgcctggctcggcaggtcccatgccaacagagccttgctcactgctcatgccgaagtccaagattgacctgcaatgctgcagcttgatggggggagtggcatctgccattgcagaggcttgagtagctcacagtgtaaacaaagagcccaggaagcatgaactgagcagagcccaccaaagctcagcaaggcctactgcctctacagattccatctctgggggcaggacatagtagaacaaaaagcagcagacagcttctgcagacttaaacatccctgtctgacagctctgaagagaagagtggttctctcaacatggcgttcgagctccaagaacagacagactgcctcctcaagtgtgtccctgacccccgtgtagcctgactgggaacacctcccagtaggggccaacagacacctcaaaaaggcaggtacccctctgagatgaagctttcagacgaaggatcaggcagtactatttgctgttctgcagcctccgctggtgatactcaggcaaacagggtctggagtggacctccagcaaactccaacagacctgcagctgaggggtctgactgtcagaaggaaaactaacaaacagaaaggaatagcatcaacatcaacaaaaaggacatccacaccaaaactccatctgtaggtcaccaacatcaaagaccaaaggtagataaaatcacaaagatggggagacaccagaacagaaaagctgaaaattccaaaacacagagtgcctcttctccaaaggatcgcagctcctcgccatcaagggaacaaaactggatggagaatgagtttgacatgttgatggaagcaggcttcagaaggtcggtaataacaaacttctccaagctaaaggagcatgttctaacccaccacaaagaagctaaaaactttgaaaaaagttagacaaatggctaactgaaataaacagtgtagagaagaccttaaatgacctgatggagctgaaaaccatggcacaagaactttgtaatgcatgcacaagcttcaatagccaattcaatcaaatagaagaaaggatatcataattgaagatcaaattaatgaaataaagcaagtagacaacattagagaaaaaagagtgaaaagaaacaaaaaaagcctccaagaaatatgggactatgtgaaaagaccaaatatacgtttgactggtgtaccggaaagtgatggggagaatgaaaccaagctagaaaaccctcttcaggatattatccaggagaacttccccctaacctagcaaggcaggccaacattcacattcaggaaatacagagaacaccacaaagatactcctagagaagagcaacctcaagacacataattgtcagattctccaaggttgaaataaaggaaaaaatgttaagggtggccagagagaaaggtcaggttacccacaaagggaagcccatcagactaacagcggatctctcggcagaaaccctacaagccagaatagagtacgggccaatattcaacattcttaaagaaaataattttcaacccagaatcccatatccagccaaactaagcttcataagtgaaagagaaataaaatccttcacaggcaagcaaatgttgagagattttgtcacaccaggcctgccttaaaagagctcctaaaggaagcactaaacatggaatggaacaacaggtaccagccactgcaaaaacacgccaaatggtaaagaccattgatgctaggaagaaactgcatcaattaactagcaaaataaccagctaatgtaacattataatgacaggatcaaattcaaacataacaatattaaccttaaatgtaaatgggctaaatgccccatttaaaagacacagactggtaaactggataaagagtcaagacatcagtgtgctgtattcaggagacccatctcacgtgcaaagacacatatagtctcaaaataaagggatggaggaagatctaccaagcaaaagcaaagcaaaaaaaaaaaaaaaaaaaaaaaaaaaaaagtaggggttgctctgatacaacagactttaaaccaacaaagatcaaaagagacaaagaaggccactacataatggtaaaggaatcaattcacaaagaagagttaactatcctaaatatatatgcacccaatacaggagcacccagattcataaagcaagtccttagagacctacaaagagacttagactcccacacaataataatgggagactttaacaccccactgtcaatattagacagatcaatgagacagaaggttaataaggatatccaggacttgaactcagctctggaccaagcagacctaatagacatctacagaactctccaccccaaatcaacagaatatacattcttctcagcaccacatcgcactcattctaaaactgaccacatagttggcagtaaaacactcctcagcaaatgtaaaagaacagaaatcacaacaaactgtctctcagaccacagtgcaatcaaattagaactcaggattaataaactcactcaaaaccacacaactacacggaaactgaacaacctactcctgaatgactactgggtaaataacgaaatgaaggcagaaataaagatgttctttgaaaccaatgagaacaaagacgcaacatagcagaatctctgggacacgtttaaatcagtgtgtacggggaaatttatatcactaaatgcccataagaggaagcagggaagatctaaaattgacaccctaacatcacaattaaaagaactagagaagcaagagcaaacaaattcaaaagctagcagaaggcaagaaatgactaagatcagagcagaactgaaggagatagagacacaaaaaacccttcaaaaaaatcaatgaatccaggagctggttttttgaaaacaaaatagatagagcactggccagactaataaagaagaaaagagagaagaatcaaatagacacaataaaaaatgataaaggggatatcatcaccgatcccacagaaatacaaactaccatcagagaatgctataaacacctctatgcaaataaactagaaaatctagaagaaatggataaattcctggacacatacacccgcccaagactgaaccaggaagaagttgaatctctgaaaagaccaatagcaggttctgaaattgaggcaataattaatagcctaccaaccaaaaaaaggccaggaccagacggattcacagccgaattctaccagaggtacaaagaggagctggtaccattccttctgaaactatttcaatcagtagaaaaagagagaatcctccctaactcattttatgaggttagcatcatcctgataccaaagcctggtagagacaccacaaaaaaagagaattttaggccaatatccctgatgaacattgatgcaaaaatcctcaatacaatactggcaaacagaatccagcacatcaaaaagtttatccaccatgatcaaatcagcttcatccctgagatgcaaggctggttcaacatacacaaatcaataaacgtaacccatcacataaacagaaccaacaacaaaaaccacatgattatctcaatagatgcagaaaaggcccttgacaaaattcaacagcgcttcatggtaaaaactctcaataaactagatattgatggaatatatctcaaaataataagagctatttatgacaaacccacagccaatatcatactgaatgggcaaaaactggaagcattccctttgaaaaccagcacaagacaaggatgccctctctcactactcctattcaacatagtattggaagttctcactagggcaatcaggcaagagaaagaaataaagggtattcaattaggaaaacaggaagtcaaattgtttctgtttgcagatgacatgattgtatatttagaaaaccctggctgggcacggtggctcatgcctgtaatcccagaactttgggaggccaaggcaggtggatcacgaggtcaggagattgagaccatcctggctaacacggtgaaaccccgtctctactaaaaatacaaaaaaaattagccaggcatggtggcaggtgcctgtagtcccagctactcgggaggctgaggcaggagaatggcgtgaacccgggaggcggagcttgcagtgagcggagatcgcaccactgcattccagcctgggtgacagagcgagactccttctcaaaaaaaaaaaaaaaaaaaaaagggaaaagaaaagaaaacaaaactccatcgtctcagcccaaaatctccttaagctgataagcaacttcagtaaagtctcaggatacaaaatcaatgtgcaaaaatcacaagcattcctatacaccaataacagacaaacagagagccaaatcatgagtgaactcccgttcacaattactacaaagagaataaaatacctaggaatccaacttacaagggatgtgaaggacttcttcaagaagaactacaaaccactgctcaacgaaataaaagaggacacaagcaaatggaagaacactccatgctcatggatgggaagaatcagtatcgtgaaaatggccatactgcccaaggtaatttatagattcaatgctatcctcatcaagctaccactgactttctccacagaaatggaaaaaaactactttaaggttcatatggagccaaaaaagagcccacatagccaagacaatcctaagcaaaaagaacaaagctggaggcatcatgctacctgacttcaaacaatactacaaggctacagtaaccaaaacagcgtggtactggtaccaaaacaaatatatagaccaatggaatagaacagaggcctcagaaataacaccacacatctaaaaccatctgatctttgacaaatctgacaaaaacaagcaatggggaaatgattccctatttagtaaatggtgctgggaaagctggctagccgtacatagaaagctgaaactggatcccttccttacaccatatacaaaaattaactcaagatggagtaaagacttaaatgtaagacctaacaccataaaaaccctagaagaaaacctaggtaataccatttaggacataggcatgggcaaagacttcatgactaaaacaccaaaagcaatggcaacaaaagtcaaaatagacaaatgggatctaattaaactaaataacttctgcacagcaaaagaaactatcatcagggtgaacaggcaacctacagaatgggagaaaatctttgcaatctacccatctgacaaagggctaatatccacaatctacaaagaacttaaacaaatttaccagaaaaaaataaacaacctcatcaaaaagtgggcaaaggatatgaacagacacttctcaaaagaagacatctatgcagccaacagacaggaaaaaatgctcatcatcactggtcatcagagaaatgcaaatcaaaaccataatgagatacatctcatgccagttagaatggcgatcattaaaaagtcaggaaacaacagatgctggagaggatgtggagaaataggaacacttttacactgttggtgggagtgtaaattagttctaccattgtggaagacagtgtggcgattcctcaaggatctagaactagaaatgccatttgacccagccatcccattactgggtatatacccaaaagattataaatcatgctactataaagacatatgcacacctatgtttattgaggcactattctcaatagcaaagacttggaaccaacccaaatgtccatcaatgatagattggattaagaaaatgtggcacatatccaccatggcatactatggaaccataaaaatggatgagttcgtgtcctttggagggacatggatgaagatggaaaccatcattctcagcaaactatcacaaggacagaaaaccaaacaccgcatgttctcactcataggtgggagttgaacaacgagaacacatagacacagggcggggaacatcacaaactggagcctgtcggggggtggggggctgggggagagatagcattaggagaaatacctaatgtaaatgacgagttgatgggtgcagcaaaccaacatggcacatgtatacctatgtaacaaacgtgcatgttgtgcacatgtaccctagaacttaaagtataataaaaaataaattaattttaaaaaatgcaccctacaagttgtggcttacatgatttccaccgttccacccccaaatagactgatgcatacccaaaccatttgacataaactcagcctagaaaaaagctatgaattcaaatccaagtaagccaaagtgttctttcctgtcagtgccagccaagcagagggttatggactagacggaagattttaggagagaaagggaagcaaaagcatgaacaagccaaggtatggaggatgctcattcatcctcaggctccagaagtggcagcgagctgtctggatactccactgaaagtcacagtcaatgaggttattaatctggtggtcctaaaagatgagcagcacagacaccttgaatctctggatacacttccccctctgcatagcctctctctcagttcctaaaccctccatgctaagaaaaacatcaccaggcatggggctttgccagaaacgttcactcgaaacagtacctggcaaatgaaaaatgcacttttaaattatgtactttccgactagtcttcctaatggtatgttgactattatttacatgaaaaatgtcaaaatgtggattcctttgttttatttttatttggggcattttaaacaaaacattcactttaatactcatggagaaaggtctacttctctttcatcttcctctctgtcttccaaccaaaactccttgccaaagaacacggatggccaacaggacttgcactgaccacatcgcactcctactagaaaattacggatggaggaaccagcaatttctagatgaaatggccctatttcctcattttaccactaaggataaagaaggatcatgcctgtaatcccagcactttgggaggctgaggcaggcggatcacctgaggttgggtgtttgagaccagcctgaccaacatggagaaagcctgtctctactaaaaatacaaaaaattagccaggcatgatggcacatgcctgtaatcctagctgaggctgaggtaggagaagcactcgatcccgggaggtggagattgcagtgagccatgatcacaccattgcactccagcatgaacaacaagagcgaaactccgtctcaaaaaaaaaaagagggcaaaaagtcttcgatgacaagcctggacaggactttaacagtatatgctccaatttatccctgtcacagatgaggaaactgaggcacaaatcagtgaaatgctttgttcaagactttacagctagttagtgacaaagtcggggccagaactaaggaatcttgattccatgccctcttcatactatcctcgtcaattctggtttaagtttttcacttgatttgtatgtttgctttatcttaagctcatatttcaaccctataacctatcttgcatatgatgtgggttgtttattcttagaaaaatctaagattattccactgtattagtggccttgcctaaatagatgcattggggagaaatcctcccacataatgaattttgtcactgagacattgcaagaagtagcccatagccttttcttatccttttagaaacagcctgaaaagttcgattatcctccagattcaaccttagtccatttggtttcatgctcattcctaatcccagaccaattcctggccctgagcccaggtactggtatggcctggaaaatgccagaagccatatggactccccaggctacctcctggatgaggatggatggcacacaccgaggaaccaactctttccaagagatagaacagatggcattccagatatgaatatgtataatgtagactgctaagttgttaaataagtatgtatttttaggtggattcatgaaaatcaagaattttataactaaaatgaaagccaagcaaatgaaaccacaaacaccattgaaagctgtgcattactccatgtttgttggtattggcctccatagcatgctccaacctctagagaaaccactcgagaagaaccaggaagaaataattcaaaactgcggcaaaggatgttaacttcaagcttccatgctctaagaccctaggacgtccatggatggcagaattagtattcagaagagcaaggagtgggctggatttttccttggctttaccacctttctctatgtccctttattgaaaattccactctatcacacccccaactcaaattccttatgctttaatttggctgccccaagaacaagcctaagaggcataagaataatgcaagtcattgaatcagtagaatcagtcaagaagatcagcttccacaagcttccagtacaaatagtacccttcagaagactttaagctctttgctccgtaataatactacattacaggtatacttatttccagtttacagaaaattttaacaatcccatgtgaaaaaatagaacatgaattgttacccccatttttacagagaagaaaatgaagtcttggagaggttaaacaaccactcaagaatgcaccaatggtaaatgtgccactgggacttgaagctaagactctgattctgtccagtaatgcatctgatttggcattcaccaatgaacctacagccaaacgggccatcactggagaagtccaactgctacttgaaaagcctaatccatggattaacagattccaatgagttagaacatcaaagggtagaataggatatatttccacaatctgggaacattccaaatagagaaactggattcttatttatccattattgatgcaagtccttaactccttcctgtatccatgggaccttttgcaatccttcacactagagacagaatacactctcctgctccattaatgataggcaatggaaaggtgatctgcttcatccaatgaaatgttagcaagtgtgatgcaagcaaagactagaaattgacttacttggttgtgcttgtcctcttgtgctcctattatctgcccacagtagctcactgaaccaagggaaatgagaaacatgtgcatagatctaaacttaactcactgctttgagacaagcacatctgagccgagcctagatcatccagcatgcagccaactgctgacacatgagcaagaaagaacatatattgttatttgaagctattgagtttggggctgacttgttttacagcaatagctgactaatacacttgctatatttctttcatcttcctacttccacttcaatgcaaatggactctgccccttgttattattactgtctgtttctttccaggcagcaaatcaccacctcttttgatgtcctaaattatcagcagtctcaatatcaagatctacatagtcattaatttacaaaaagctattattaggaagtgagatggtagtaaaaataaggtaggtgaagttatacccacaaaatagaatatcggggtgccagatcaatatttaataaatggttgaaaacttcaaacatttaaagattattttgtggttaacaagttagagaaaacacattgccattagacgacatttcttatgtgcttctttacatagtgacctggtgcttgatgtgctgtgaagacaggatgctcatcgccttatagtttatcgataaacacaggcaatacagaggcaggcagctagtagaaaatatagataggtgttggataaattgataataaaagggtaagattaagtgttttgtttggtcttattttaccatttcagatttgcttgattattaatttccaaagccccagaaaacccaattctcctgcattcctagaaatcgtggcaggtttccatctatagaaaattacatgcttttctaggtgtttcagaggtttaagttgcttagttctttaagaaactgctccaagctggggtgaggggagaagagtgtaccagtatcaacccacttacacaaagaaggacttgactattcatcaggtatctagggacaatttcctgaagatgatggaaagaagacagtgcctaacacttggatggtaagcacttcaacagtatttactaaattaaagaagggaggaaaataggaactagtcctgccttacccatctttccattccttccgctttgtgttttcatctcagttttgtcagatccatttctctggcctctccaactctcaaagttccagccctgtgattcagccatcgcaactctcccaaagtgttcattgatcacatttcctccctagtcattggcacagtgcttctttcatatttgattcttgacacctgcaggttttccattttggctctcaactttttttattataccccagtgggctttgttttgtacatatcccccaccctgagtgtagcctcagaaaggtggactttggttctcaattataagaatatatatattctttctaatagcatcatgctgggcactgtagtatccaatcctatagtgcttacaaggcactttattccacactaactcatctgaccctcacaatggtgttctcagttggataggatgaccctaactgttcaaatggggactcagagtacaaaggaggtcacagagttggtatatagagaaaccaagacacaaacccagttttcctgtctctaactctgggaattatttctttgcatcatgctattttaaaaagtactagcactgctgaaattcttggactttctttataatacacaaccttagaagagaaagtaaatcattgctaaggaaaggaacttttcttagctcaaaaaacagcctcaagaggactgaacctcttagaatgctcgtctttgcccagatgatcaccagccacactccaacatattgatacagattttatgattttataattttgggttcagttggcaggactcactcttccaaaaatagctttggccttaatgggtaggatgagctgcattacaaaggccctcaactccataaaatttggcatccagccaagccttcaaaggtgactaaagaagaaatatcaagaaagaccagaggttggtactgccttgtgaacctctcaacatctattggaacttatcaattttatagatattcacattccaaagcaaggagcatttgagcttttagagagattagaagaccctaaaaagtgcatctcgctcaaaaggtgtccagcttgtccagtggtcattgtccaatctgattccatttcaaaatcatttccatataaccagcttgatggtgagattcttgaaaagttctagaccaggaggaggaaatgagggtttggttcctggctgtgccactaaccgactgcatgaagttaagcaaattatggggcctattccaacctcgttctttttacaggtctgacacctacaacgtgtcagacactgggaatagaacagtccacaagacaaagtccttgctctaagggaacttaccttctagggaagatatatgataaaccaatacataaatatataataaggacatgaaagcaatagagaacaaaagtgctgtgaaaaagatgctgttttggataggatggtcttttgagcagtgaaataaaataaatatctgagggaatagagttccaggtggaggggacagcaggaaggccatgaagttggggtgcacctggcatcttcaaggaacagggagaaggccagtacttctggagcagagggaacagccgggagaatggaaggcaaggaggtgagcgataacaggggcccaatcctggagggtcttttagctttggtaatgactttggatgggaaggcagtgggggaatctgagcagatgagggtatgaactgacttaggttccctgaatgtgaccttggctgctgtatgaaggacgggcagccatttcctcatctgatagcaaactggtatggaccagagaaacgagaagcttcccactgccactctaagagctgagattccgagtcatatgttttactgaacaaattactgcccatcttggttgaagcccatcggggcctgagctaagtctttgatcccagaggccaaggcagcaccattcctcgccattagcccatggctagtgacccgggaggtacaaagtcaatcctagctacagcaggaactcctgcagaacctgtgaccctcatagccagggggtctcaaaccagcgggatacatctcagagtggctttgctgcgacgtacctttgggtagtttgagactgaaatgactctagtcactacttttcatttccatcctttcttccctaaaggtcaactggaaaggcagccggctgagagaactcgatctctgtccagcagagattattttgtggacgctcaaggttctgagagcttacttcctttttctgggtcacctgcttggtgtgaattcatccaaaatcatccgtttatttttagagctataaattatatctgcatttctactctcctgcagaaattcaagctcagagcttgggcaggggccctgtgtttgaggcacagagactggcaaagcgtcttgcctcccacctcttctgaagtgaggcctctgcgctactgtgtcccagcccttcaaaaatcctgagtcatttcactgtttctgtttctcccctttccccagcaagcttcctgatgcaaaggaacaccggagcggggcgattgcctccctagagctgggccggccacccccacccctcgggctgctaaagcagcgggccgggcggaaggtcggggagccagagcccagggaagagcagaaggcgcgggggggcggggggggcacccaggagggaggacggggcagcggtgagggtgtagacgggagggaatctgtccggtgccgcagtgagttgggtggcggtgatttgttcgcgggcgcaggctgggaggcggggttcctgactcactgcggcactggcagggctggtgacagcaccacccccgcgccgcctgcaatctgccaccgctgccaccgagccgaggggcgccagcaaggcatcccctgggtcaaggggcctcccgtgggctttccaaacagcctgtgctcatttccgcgggagccctcggggcgctgtgctgtggctgcattgtcactgtttgtttatttctacatctgctctgttagaagataggctcgcttaggacagagccttctaatccaccccctgatgaattcgggccctcgcctttggcacaatgcctggcgtcatcacaacgcgggtgatcagtaaacggcagcgaaggaagcggggtcaggactggagaggagagggggaggaagacagacgaccggagaggaacaaaaatggaaggtaacttgagctttcataactgcagaagtgcaaaacagctccctgtgtgatataggaagtaaaaccgtagagatgggacttggctggcctgcccttcacacactttagacattaacccaaagttcatgctcctgccatgacagtgatggtggacaggagggaagaaaatgacaaggaggaaaggaggtgtcttttgctcttaaaaatgagaagggtcataaacaatccatcggctgcaaaccacgagttgcccccaaagcaaagcaggttagtggctgctgccgcctcatcatagcttcagaacccacagagcctggaggactgtcaaacattatctaatatcccattctacagaagagaaaactgaggttgaggcaggaacgcagacaggaatcaaggttttggggttgggatttgcaatccattactttgcctcctgcatccactgcttttccctgggcattctcttcttccggtttcttggaagttaaaattgcgagagaagcaacacagagtggttttcccagggcctcgacctcggtaagggaagacgtggaattccgagtgtggagacccagacagcctccgaaacccccacgcaaccctgggcgttcagcagctgccaatgcccgcctgacaagtttctggggcatctctgcacacggagaggtgtgtctcctgcagctccaaaaacagattttgccatctcatccccatatttgcagtctccagttggcttcttgtgattggccagaacttttcctcactggagagatgaggagaatccagtcctccaaccagctgagagaaaacactgcagtagcagagatagcaatggctgttccaccccacactgatacgatgtcagggagccaggggtgggctcaacaggctgaatgatgccagggactcccaagggtctatacatttaaccctggaggaagtggcctctgaccaggtacctaaccttctgtacttctcgttctgtaattgggggcatcagagtgtattctttggctttctggaaaaaaagatttctcaaattttaatttcggaagtttccatcaggactggcagctgtgtacacagaaggaggttgctaatgtatttcagattgggggcaattacagcttcccacctacccaccccaatctattcccagatcactgcaccacactgactcttggcctcctctagagttggaaactctacctgagagatgcactcctttaaactaacataaaacctaaactaacaaaaccatagcacttcaaggtatccttagggtaaggtttaatgacctattaatatctctaacacagcaattctcttgcttggctattcactagaagcacttggagaatttaaaataacactgatgcccaggccatacctcagaccatacctctagaggtgttttctaaaagctcccccaggtgactataacaacagtaagactgaaaacctctgctctcgtgggagctgctagtttgctggtcagcatctgttctcccttccactaatagcacctgatgttcctttggaaaccccactctttcttggtccacttgattgagttacactaaccccatcatcacctcccatttacttttttcagggaatagcaggctaccagtttggcccctttgcatttttccattcccctgaaagaagtaattggttcaggcagaagatgtgatacaagggggtccaatgaaaatcagtctcaagactggctgaaactattgggaagggaaagatctgtttctgctgcagttatttaggagaaaacatgggagccttgagcttccagcaggcattttgccaccacatggagaaaatctgcttgtaaattaaggcaacatagaggaaaagagattattcatagagtgaaaaagactgaaatctaattaataccacttctgaagccagatacttccagtaacagatattaaatcccccttttcacccaagaaaactttgaactgagttttctatgatatgccgcatcatagcagagttaatctgttgctttaaaatgcagagaatagagttctaatctaatatgacagcaaacaagcaagcttcaacattcctggtcaaagattccagatagctaaagacaagtgggtgctgtccatcttcaaggataatggctttcagtggagaagggtgaggaaactgaagacagcaatgttctactacatgtttttttcagttagtatcaagagttattggtagcttagcctttgctaaatatgaaagagcttaagaagtaaagaggttccaaccataggaacctcttttaaccgtaactataagagcttttataatagctcttataggtttttatagtagctcttataggttttaaccataactgtaagagcttttataatagctaatatagcagtgatgtataggaagtacacagaagcacacaacagaccatcaagacaatgcattggatgtttcagattcccttcttggtcacgggagattccctggaaaatgtgccctctgtctgaaagtgcaagtgaagccaaagtaattgattggctgcattttagatttgaaagtttttccatgaacaattgccatgtaacaagctacccctaaatttggtaacttaaaaaatgatgtgtttgacttgtctttgtatagacttggatagcttttctgggcttacctgggatctgcaattggcttctggtcagctaagtggctctgtgtctgaacttggctggctcttggctggggcaatgggagtgatgagctaatgtatctgtcaacccttcagagcctagcctgggcttattcacatgggggaggcagggttccaagagtgagagcaaaattgcacaaggtctcttgagattcggactcagaacttgctcactgtcatcctgccacattctatttgtcaaagtgtgtcacaaccccattttttttttttttttttgagacagagtcttgctctgtcacccaggctggagtgcagtggctcaatgtcagctcactgcaacctccacctccaaggttcaagcgattctgctgcctcagcctcctcggtagctggaaccacaggtgtgtgccaccacacccggctaatttttgtatttttagtagtggtggggtttcaccttgttggccaggctggtctcaaactgctgacctcaggtaatccacccgcctcggcctcccaaagtgctgggattagaggcatgagccacaacgcccggccacaaccccgcttcttgatggaaggagctgcaaagtcacattgcagagcaccagtaagagctcagagatcatttagcccaatcctccccatttaacagatgagaaactacagacaccgagcttacccaagtccccatttgattaaataaattatataggattatgctgccttccacactgatactctgtccacactgatgttttgtccactatatctcctttttccaagttatttcccatacgatgtagctcatgtccattatcataagatctctgcgaagtggttaggcagaaattgcctaaatgtgctacctaacaatggaagaaactgatactcttcttctcaaattcgcccatcaaatatataggaattcttttccaggaatgggcactggagtcacaacagaaagcagggcagacatagatcttatctgtacagaacatagagtttaccatttaagtggtgtcactgggacttcaaccaagactgtatgattcctcctctggatgtacttttcacccacagtggttgttatggttccctgaaggctagttcgtctatcaaagccagttgtttgtatttgtgacggggcaatccatattaatttacagggttctcagcctcccctcatccccttctcttctccttgtgaatgagaatgctctgtttgatcactcaactttgtgtattccccactgtctttactgggtaaggtcccaggatttgtggtggttgactctgaataatgggaagataaagtttagaagaatcaggaagaaaaaagtaagagaatgagacaggagaaccacataagattgggcagcaaaaaaagctggggtgcagaatagaaaggaagggatttgtagaatgaataaaactacaggccacatgaaaactagagagaagaaagaatgttttaaaatactgtactgagttatgaactgaatctcttatttttcttccagatacagaagtgaagtttgatctattttttatttttattactatcggccactaacttagttggtttttaatgtaacactttggcaggcctaaaccacatgcaaactgggtagttatctggagcaaatttaattaagaatcattatgtcccctgaaaggacaaccagagtttgtgccttctctaaatacttggtccaaatcaaaacatcaattgtccttttcttaatgaaaaaaaaaaaacctcaactccatactttattctggtttcattgatttttcccgaataacattttttctgtttcaacatcctaattgggataccacattgtattggtttgtcatgtcttcctaactcctctggactgtggcagtttttcaaactctccttttttggggtaaccacaaaagttttgaggagagctagtcaggtgaaatgcctttcaattggatttttctaaatttttcttttcatagttacacttgagttattgtcttcccacagagaaaagaccacagaggcaaaatggcattttaaacacatgatatcaagtgtgcatatcatcaacgtgacttatgaccaatgacgttaacctcgaccatctggctaatgtgctgtttgccaacttctccactgtaaagttgcttctttctccctttccatcctgtattctttggaatcaagatgctaattgtagcccacacttaaggagtggggagttctgtctttaaccatagtgaagaattttatttactggaatttcatttaaagttggagtgggaaggaggatgattctcagaagaacaatagtgtaaagaacagaagaacaatactgtaaagcataaggggtgagggagttcccatattataagcatgatgggcagaaatattgcagagtagggaatgaagaaatgggaagccacatgctggtgaaaggaaggtttggaaaaagagagaaaatttagcagttgttctcactgaaaaattttgtgaagagatacctagagagaatgttgtgaatgttttctgagcaactcactgtgagaagcccctatactacatctttgagaaaacttacagtaaagatttacattcatcttctaggtaccagaaactacactgttatcttgtccaggcaaaaactggtccacaagagagtcctatcatatttgggttgtaccagcaaacaataagttgggctgggtctagatctgaaatgaaagatctgtaatccaaagaccagatcaagcatattgtttaatttcttcaacctcaaggaacttataaaattgcttatagtagcagatttttgcaatggcatccattagttccacagcagtttcccattatttatctaaacatgcaaggggtagagtggctaatagtgggatctttggactgtcttgaagattggactcttttgttaattttgtattcctcgattattgcttatacatatattgtactccattgtgactcatattttttggtcattactttttacttacatataacccataacgttttttatgtatgtttctactgcagagagaaagattattcccccactcaatacctattaactgattggctgctttatggttgctatttccattctgcacacttgtgttgaaagataaagcttcgataacttacaaggagcagtttagcaagttgaaagaaactagatgtaggatccatgtgtttccacaaaggatatgcaggcttcaactagaaagatgatttaagtgtttagggaagaaataagcatgttctaacaagagttttgcagtcagcaaaacaaggtatgtggtaaataggtcctatcttgggaattgccagagcccagagcttgtgctgttggcccatccaaggaaaccagttaaattaactgtctggaaggcatccacagagatccttggctgggaggcagaagcaggacatggaacaggtgcccctttccactattcctgggcacaaagtctcatttccagcacacgctgtggcagcaggagatgcagtaaatcaaccaagcttcatttcatctcagaagtcctctgtgtactaataatgcagggaaacttagctcatgaaggaaagaaaaaataaataaatgctgacggttgttagagctagtcccagtgataagcctggaacaggcaaatattcttagtgattcagacaattactattaaacagaggccagtttccaagtgacgttgtggtgccaaacacagcttttatcatttttgatgagatttttatgatgcttgttatctgccaatattattaatgttgttaatgacataaaaaaattagcatttgccacctgtgtgccagaaggcaggccttcttccttctttggtctttgttctcactagtttcataggccatctttgctttgagaaggagcaaagttgtcagcctagaccttgtttgagttcttgtctgaaatatactggtcacctaagtgcataattcaaagaagcctccagcttggtagctcctgggcctcagtccttcaatttgccttttaagactgctgggaaataatagcattcagttagctgttactctcacattagaaaagtaaaatgaagtattccacagaaaaaaaataaaatattttgtttcaacatcaaaatcttaagtgggattggatatgaaccctagaagaagaccatctctgggaaatccctattgcaaggacagaagcaataagattcttagccagaaagaagcgatccttgggccaaatgcagtgctgcccccagtggtctggatagcaatgctctgtgagaccagcagctttcagtcttgggaagaactcaaatctccatcagataaaaatgtctaaactggcccatacccgtattatcatggggtggacttgggtgccgtgtggactgtgcaggccacatttgggttggttaagtgtcttaatctgccctgtacccatagctaatgtatccttaagtgggaaaggagagacagatgatagataactaaatacaactacagtctgcatcattcactaaagcaagtcaagtgaccaaccccagatccaaggagtgtggaaatagactctgctctagacgctacctcatagaaagaggaattatgagatcacctgaaaaaggatacatgaatacagggttgggcaaagaattaggacaaatggtgcaatccatcactaccagtttaacatcatctctttcagattaactcagtctcatttgggcaaataattaatcactttttattcaaatgctctagaaggattgttatctcttccttctcagtggatctcacaacctgatctttccttctaatacagtgtttgggaacaggtagaagtttatgttcttacctacatattgttctctgctggctcccagtgacctcaagttcagatataccctaccagggaaaactctaattttgctgcatctattgctgatgggtcttgtgtaatttatagtctgtccttgctgaattgtctttctttgggggtcttggtgttgaaattcctcctctgggacatggcaatgattcccattcaacctagagcctgagtgacccaccctacaggcctcttctacaaaatcaccacattctttactgagagtcctttggtggagtcataagtcagtttcctggggcatgcaggaaagtgaattctctgtaaagcattctcaggctaaggcaggcgaaataagctttcttggtatttaacactatcatgtgttcatttcttttcttttttgacatctccctgttggcataggactcatcttaaggtctttaaatgttctaggatctgctggtaaaagtgaggaataattttccctgttctggcattcctccaaaactgtctggttatttctcccactgtatcatcttggatgcttttggctctaaataacagaaaccctgactcaaactggattaaacaagaaagaacgtcattatagcacaaaatgaaaagtctagcattaggtttggttaattcaggggctcagcaatgtcagctgggacatgggttatttccatctcttcactatgaaatccacactgttgacttcattccaaagctgacttttctgcatagccagaagttggctgtaaatagtacagtaatacccccctatccaaaagggaattgttccaagacctctagtggatgcctaaaactgctgatagtaccaaatgctatatatactatctttgttcctatccatatatactatgataaagtttaatttataaattaggtaccataaagattaacaaccgtaagtaaaatatgggttagttgaacacaagcactataatactacaacagtcaatctggtagccgagaggactaaatgactaatgtgtggtagcatgtacaatatggatatggtgcacaatttaaaacttgtgaattgtttatttctcaaaatttccatggaatagtttcagactgtggttgaccataggtaaccgagatgcagaaatcaaaataaaatcatggagacggggggaatgactactgtatggagagcctgcttcctccatcaccaatgggaaagaaaaatagaaaacttctctgtaaccttgtatttaaaaacttttcctccatcttcattgggtcatctcagaacaagtaagaatggacagaggaataccatgtgctgactgacgaacgcctgggtttctgaaccaattgccatcaaggggattgggattaccataatttttgctgagactaagccccaccccagtaaccaaaggtgagttcagtttctctggtcactatggactgtgtgaggtaagatgggcagctatcaaaatagtcagtctatcaataaagagcaggcaaatacgaagctaattgctcaaaaataatcatcttaagtgatcatctaaaactatctttctaaaggttttgtctatctgctagaaggaaccagttcactcatatctgacctcctgcccctcagtttctctttctccctctctctttcagtggtgggaaactttctactcctttctgtctcattgaaactttccttttaatgtaagctaagtttttctactctgctttacagcgaaactctgtgttcagtctccacacattgctcttaatatgtaaagaaaggcttaactatttttaattttttctttgctgacaaaagttagctttctaaacttttgtttcattcaacttttaagttgtgattcagtgacacctcttattgtctaggggcccctgccatcccatgaaaatacatatgccagtgacttaataagtagagaatggcaaggcagtaagaaaaacaggtcaacaggaaattcagaatacatgaaaaaaaaatgggctgggctagatggctcatgtctgtaatcccagcacttttggagtctgaggtgggaggatcacttgagtccaggagttcaagaccaccctgggcaacataatgagaccctgtcactactgagaaacaacaacaacaacaaaaattagctgggcatggtggcaagaccctatctctactaaaaaaaaaaaaaaaataggcacgatggtgtgtgcctatagtcgtagctacttgggaggctgggatgggaggatcacttgagcttaggacttcaaggaaggttgcagtgagccatgattctgccactgcactccagcctagccaatagagcaagactccgcttcaaaaaaaaaaaaaatctatccctatcacaccccttcctggtttttcctccaggtacagagaattagagccttcaaacgcagacattatcaatttggtccatgttgcttaagatccaattggcttccttcctagcaattattataatttgtaattatttgcaattatgtcattttttgtctgctattttattgcctatttcctgcactagaatgtaagctctatgagacttcaactatattgttcattcacatccctaacatctagtagagaacctggcatggaacaggcttcctatagttattagttagatgaatgaatgagtaaattttctcctcctaaattgaatggtcttacacagtttagcactttcaggcccattatggtagctgactctcagaatgaggttactctgtctaccagataataataataatagtaattattcaacatcagagatgttaagtgatttgcttaaagacacccagtaagtgtgaaatatgaatcttaaactcaggtctttctttcaagtcctatattctctccatttttacttgtcttaaagttctccaagtttaagaaccattttagcattgagagatggtagaaagccttctcaagtcaaagtgaatagggtgagccaaattagggaaggcaacagggagcattctgggagaaatccagtggtgcattctgggagccctttcatgtacttagcctcatccaatgcccagggagatgtgagacttcccgcagcccacagggcaagcttttccctgcctgtgtttgcctgcaaaaacaactactactgcctctagcaacgtctggaaccatgttccctgcataataagaaagtataaatggaggacacagtattgaagtattgaaatcacaagataaggaagattaaattaggctctgccttcctgaaatgctcccagagctagagctacatgggagcaaggccagctaccagatcttggggcttctcctttagcaaaggggaaaatccccggccctgcaggcatttcaagctcagggattggtggaggcagatctgtcaggagccccggtaacactacaaaccaggagggaagctgacaggaggacaagcaatgctggcattttcctcccttggaaatcccagggactctaacaccagagatctgaggctgatctgatgctccagcaactatataacctccaccctgcctgaacagcctcctacaaataggaaactataagatttgcattatctcagaataaccatttgtaggactagagtccgtccatcagcagtaactgttcttactcaaccttgataaaagctttgccagatgagttgggctctgtttaagtttactaggcctgccataacaaggtaatacaaattgggtggcttaaatgtagtatcacagttctggagactagtagtctgagatcaaggtgttcacaggaccatgttttctgaaactctgggtagaatccatccttgcctgttcctcgttcctaatggtggccatcaatttttggcattcacaagcttgtagctgtgctatgccaatctctgcatcagtcatcgcatagcattctccctgtgggtctttatcttcatgtgatgttttcttcttcttataacaacaccagtcacattagatgagagcacatactaatgacctcatcttaacttgattgcacctgcaaaggtactattcccaaataaggtcacattcataactaccaggggttagaacatctgcatatcttttggggaacataataacccacaacaggctaatattactatatccactttttggaggtagaaactgaggctcagagaaaccaagagatttatgtaacatcactgtggtgaatcaatgccataatggccccaatatttttcctgcctctctgaatctatctgttggtagtacatttccctgctgatgctgggcttggccatgtgacttgcttcagccaataggacagagcaagtgtgatgccagcagaggcctggaaagtgcttatgcactaggatttcttctcttgcatactctggaacaccgtgaccattgagtgaataaacctaggctagcgtgttaagtgatgcgtgaccatgtggagagagactccaatcattctcatgtcactatatgaaatcaatcagcaccagccaaacctccagctgaccacagatgcatgaccaaaccccaccaagatcaggcaagctcaacctgaatcagcagaacccttagttgatccatagattcatgaacaattatgagtgaatggttgttttgagccacaaaatttgggagaggtttgttacacagagaaaactgatacagtcacataggtgttaaatggcagagctggaacgtgtaatcactatgtgacctgttcataccacacagttctgaatcaatgggatggtgattcataattttcctgttggccacaacatgagtttcccatgtgtccaccagcatcgagccaatatacagagcctgtaactatattaacttaaatattttgctttccttctttttattcctccttctctaaattatgaatagaaagttatgagtttgccctttaattatgtgctttctggctatgaagagattgactaaaatctatggtgttagtggtgaagtaagcaagaaaaggaagagaatgaaggctctgtaggtgaaagaacagtcatcttaaaaaccagtcagttggcccagtgtaatgtagcatttgcctgcctcagttgcgtcccagggcagacggagagtttaatccttgcccctctcatatgaaataggccaccactaggatcctcaatatatttctttttttaatctctctctctcttctgcaggcttatgggtggaatgcaagctattggaagtatttgaagatgtgaccaaggaagctatgagaattggaaatgaggcagttgtttagaaacgggctgatgtgcttgtggtaaggtggaaggaggaaggcagatgaggaaaggaatgtgcaactgaagcaattagctgttactatgtaacgaaccatcccaaaacgtagtgacataaaacaacaaccatttgttatttctcatgcgcttacatttctactaggaagttctgcaaatctggattggtcttggctgatcttggcagggcttgttctggcatccactctcagctgctgaattagctctcagttcctggttcagggtggccttggcttggatgacttggctctgctccatgtatctttcacatccttccagcaggccagctcaagcctgttctctagattgtggcaaggatccaagggaaagagagaaagccaaaatgttcatgcccttttttgagccacttttttcaatgagttggctactgtctccctagctaaacacatctcagccaagcccagaaccagtatggaaggtcactaaccaaagctgtgggtaaatggaggcatggaaatctgtgacctttaatgcaatcatctacaataacaagccaatgaccatgaagctggacagagaaatagattcctgggaggaagaatagcaaaatgtctggagtaagaggaagtagggtatttcagggaactcagcaaacagtgtgatgacaaaatgaaagcacagtcatgcaatcagcacctgggtaaatatttaggttggagtctgtgttgacccagtctgcaggtaaccctcagcctggcccagcatttcactgccctcctactacttacccagaaacaactctcctgtattgattaagcaggaaagaggaaactctcctggaagacacaagggcagatccaagcaggagctaaggttttccagaatgtggtcttaggtctgtgaatggcttttggacagaggcacagctgaacattcccatggtttctgtgactttagaatcactaccacctcttgactatgcacctcttgactaatttctatttctcaaattatagaataaaaaatgctgattctaaggataaaaacacaacaaataatccaaaagtatataagatgaaaaataatagtgtgagttctattccattctccagagagtaacaactgctctcaatttgggcacttcctttctgtcttcttcctgcacatgtactttttgcatatgtcctttgcacgttcttaaccatacttgggtaatgatgccaacatcacaagcataactttctgacagcccagaaagccaaccttgtcttcttccttgttcaacccttgtgccattttgccctaaccagaaaaatactccacttggtaatgattctctctctgtgtctgtgaaaaataacattggaaagtctaatgtggaaatgttgaaccaggctgggcatgatggttcattcctgtaatcccaggactttgaaagaccaaggtggaaggatggcttgagcccaggagttcaataccagcctgggtaacatagtaagactcccatctctacaaaaaattaaaattaaccaggcatggtggcatatgcctgtagtcctagctactcaggaggctgaggtgggaggatggcttgaaccaggaggtcgaggcagcaatgagccatgattgtgccactgcattccagcctgggtgacagagtgacagcctgtctcaaaaaagaaaagaaaagatacaaaagaaatattgaatcaaaaaatataggtaaaagtgaaacaaaaggaaatttaaaaataaatatgtatcaatagataaaaaatggtaaaatgaacaagatgtggaaaatgttgtagtctctacatctggcctaatatttaatctaagaatctaatgcaaatttcttacatcatgaataaatatggatgatgggcctacagatcagatacattttaataatgagcagactaagtgaggcctcatacctctcatctccatgtgtaacctaattaatcgggccatttcagttgcagaacactcacttccataactgtcttctacttcagaagtgtgtgtttcagttagaatttgatttgggtgcagatgcctatgatagacaatgcaaacagtgacttaaagaaataaaagtttatattcctctcacataaaaaaaatttaaatttaaatagtgcagggcagatttagcactccacggtgccaagaatatgagcttcttttattttgttgctcttggccttcactttatggctcaaaatggctgctgaaactccagacatcaaacctgcattccagcctgcacagtagaggaaggaagtaaagaagggtaaaggctcattttctaaggaaattgctcatcagcctcacacaacacttcctcatacactgcattagcccaatttagtcatatgaccacacctatctgcaaggaaagctgagaaatgttgttcttgttctcaggggagatgtatgtgcccagctaaaaataaggtgttctgccaccaaagaagaagagaaaggggatattgaagttcaagtggtaatcttagacatataaagccatcaaaattatttcccccccaaacccttttgagaaactgagtgcgtaaagatagattatgactgggcacgtcaaacttgttttaaatatacaattggccaggcacagtggctcacacctgtaatcccagcactttgggaggccaaggcgggtggatcacctgaggtcaggagtttgagaccagtccggccaacatggcgaaaccctctctctactaaaaatacaaaaattagccgggcatggtggcatgcctgtaattcccagctactcaggtgggaggctgaggcaggagaatcttttgaaactgggaggcaaaggttacagtgagttgagatcacaccactgcactccagcctgggtaacagggtgagactctgtctcaaaaaaaataaaattaaaaaatgaaataaaaatacaaataaatatactatttttttcaaaggatagaaggagcattgtctacgttaaataatgcagaagattttaactgattgcagcccaatttgtttccatatccccagaggccatcccaacccagaggctttcccatagaaccgtggggaaagatctcaattgtctacactctggctctgagataaggcagcgctctctcagccctttaaagggggagaaggatgttagttctattccttaggcaagagggcctcacctgtggccattcaaccccaggttctgcaagagtgagaagcagaaagcctactttgcgttgcctctacctgaggagaagaagccaggtgtgctctcagatggtcggggtagtgcttgggaagatgtcgggaggaccgcgtagaaagctgagagtgagcttccctttgctcactggcttctcagccaaaaaccgctggagtggaagagggacattatgggcctgcagcaaactctctctcaaccttcagtttcccaatgtataaaatgagtatgatgaaacttgcctcatagattcattacaagggttgtttaaaaaacatttaccaaagtgcccgctgtatacctccatttaatgcatgcaagttcctttctcttcttccttttggaataacataacctgattgtaagaacatgtttccacaagacaacatgatgagaaatgtttggcaagatctagaattgcagtatggtagccactgaccacatgtggccattaagcactccaaatgtgtctattgtaactaggaactgaacttttaattttatttcatcttaattcatttaaacttaaatttaaaacctgctgcttgattagagtattgaaaaatatttaaacgtatttggaacaatttgggtatgtgaatttcctctttcaactataaatcttacaaaatctaaacacagatcgagtattccgaattaaaatttaacattcaaattaaaatgtgctacatgtaacaaatacatacaagatttcaaaaaatatactataaaaaagagaatgtaaataaagtcattgataatttttatgttaataactttcatgttgaaatatgttgatatattgggtaaagtagaatacaatataaaactaatttgtcctgtttcttttgacttttctgatgtgatgattagaacatttaaagttacataagtggtttgcattatatttccagtggacagtgctaagcagaggatagcaaataatcatttggattgagtcttctcaccagactggctagtgattttggccttgcacagacatttcattaattaaccgagcacctatcctgagctagggataaagtagcagttgaatcagaaataagcacataagcaaacattgtaaataagacaatttctgataattatcataagcagaaggaaggaaataaagtaataaaagagagaataattacccagaaatggagctggtttctttacatgggagggcaggcagagaaggcctctcagaggaaggacatttgagttgagatttgaagggtaaagatgagctagaagtgcaaaagtttagatgaggggaacattttacagaaatattaaatggttgtgctcaaggtcagatagcaagctgctaagtcagactagcattatatacccagactgatctgtgcctaagtctgtgatcatatccatttgtgagagatgctaatttccactctgacaaaattgttgacactaatgaactgccctcccccttccccattatacttcagcagggtattggtggggcatttcccagttatattcctaagagcagaaatcgaaaacaacagttctatacaggtaggcatatgtcatatcttggagaaaagcatcctttctactcttttcagcctcttgacttcctatgacaagaaccaattacaaatactgcagagcaagaatcaatgaaataaagaaataatgggaatgatttctgaggacaggaattaaataagtgtgtctttccaaagctatgacttaatggggtcaggataacaagctccaggaatagaaatgtcctaatgggaaaataacggcaattctgaaagaggaatagtggggattttggtgtaagggactaaccatcattacagtcccatgggaagttattagatctggaaaggtaggcatcccttcatgcttctatagaccgaaaaaaaaaatggatgtaatcagccatgtcgagttacagaatttcataggcaaactaatgatggagcaccaattttttctcagacttaggacctccaatatttttctttaactctgggggctgctgtgaagttacaaatatatggtatggagccatttaagctccagatcttgaccttttttttttctgatgctgctgctaagagtccagaaatctggtcagcctttgctttacttcataagaagagaagagggctgaaaaaaatattcatagacaccaaagtgaagatggagaaagatgacactggtgttacaggaataagcctggagctgaagtgattgggaagcccaaaaggacatcaaaagttacaggatttaagaccacagccaacgtagctgtgtcaaaagaataattcaagttttaaaaactgatttttgtttaataagaaaaattatatgtctacctcagaactctttctttggccctaggtttgtaaatccaatttcccacttgacttccaaccccaaatagaaattaggatattttattgtcaccccaaatggaacatggctaaaatagaactttggggttctatgcctagcttttcctatctggggaaattgacactacttagttgctcaaggcataccatcccacatccattttatcaccaagtcccgttcattctgcctccaaaatatatttagaaactttgtcttcacttaacctccagaaaagaggttagggttagggtttgggttagggttagggttcaagttgtcatcatcctatgtggcagcaacagtctcttaactggtgccctggcttctctccttgacctccaacccccaatccattattcagatagcagtcacaagcctacccagatccaggggaggagatatagacccccaagctctcaatgaaaggagtatctgagaatctgtggccattttattctaaactgctgcattcactcttacagaaatcagtctccatcctacctgttgtagagcacttctggcactctcactgctgctgtcactggccttgaccaatatggaaaaaaaaaatccacaccaacttcatcctttacaacgtcaatattttgcatggtttacccacagaaacagggcaggcctctgttgaaaccttaaggttttaattcagtccagttctgtatgtctttattgttagctctagtgtttcaaccatttattagtcagatggcctttggctaattatttagtctccctgggcctcagttttttcatctgaattaaatgtccttgtatctcatcatttctaagtgctttgcaagtcagccagctctatgagagttcagccattggctatgctcacaggccattgacacacagttaataataattttttagttgcattagttttaagagggcttgcttctatttcaacttttcacagaacatgatgcaaacctcctgaggatctgagctgtcttgcctccctcctccccagcatcttaaattattcttaccaacttttgatgctttgattgtttccatagccaattttctaaaagctgctttcctttttgacccagccaatttgtccctatgccagttttccaagcaaacccctatctgatttggccttctaaaaaatttctgcaaggtcttcttttctttctaactgttccaattttgttcttgagtcttcttattcaaaagaggcttctataccttttattagcgtacatttctaacaaaaagcagtttctcttgtttgaattttattttgctctgtgttaaatggacaatgcatgctaaggcagaaaactaaattccttttacatattggagattcatttaagctgggatagaagacaaagataataaatatttttcaaaactattaaaaattttaaaaatcaatcatgattaaattgcttacaaagagaaggaatttgttttgtttattttgaagcctctttttctaaattttggctctgaaatatatatgactatatcacacatatatgcaaatgaaaataataaaagtaagttctaatgaaaagacatttagcacatttaatcaaactaaaccactttgaggcatcaacaatccagaggagtaaggctatgtgtgtgtgttttaaaatttttattgcagtataacaatgacatagaagaacacacaagtaataactatgtgatctgatgaattttcacaaacttaaaacactcatgtaaccagcaaaagggttatcttatttaaaaagtctcactgatgggctcttgagaaacacctgtatagttgtcctaccttgttattaactttatgtaagcatgaggctgtctctccaactcaatgatatattctacatggccggatagtaggactgtagtttataccacacattttttctaacatagtggtagctaagtgccctggaatgaggacaccctgagtaaatgaatatgaactatatcagactcagtttattaaacattaatacacacaaatctctgctccacatgctttcgattcctattttatcttctatatcactggcctttgcttctaagtctttttgctgtcaccaacctcactgacaaattatttaatcaattattgacaaaatgcttaagtttcctagaactcaactattcttcatctaaacctctctctggccgagttcagttggtcccatggctttaaataacacctataagctaaagactcttgagttataacccgtactacagccaattaattgcatttacggccccaattaatggcctttctatatccctctcatatcttgacgtgagctgttgcaaagtcacatcgcaacaactcacatcaagaggtggaatctatttcattacccagtgaatctgaactggctctataactttctttggccaatagaaggttggggaataccaactgcattaccaactttaagcctgtgcttactcttggagccctccgtctaccatatgatcaaacccaaggcagcccactaaagaatgaaaaaccacatggaacattacactcactgacaatcaaccaacccctggaagcaaagccatctaaccaacttgcagctgactactgatgcatgaggtaactcaagcaagactaaatgagtccccccagcttaacccagctaaataaacaacctgcaacctcatagggtaacaaaatagttattgttttaaactgctgacttttggtgtggtttgttacacagcaatagctaactgatataccagcttagacatatgtgtagacacgtattcaacaccaatctacacttccatgtagacatctcatagccattaaaaaaatctataccaaatttgatgtttaccccatctaaaaacctcttcaatgttttccttttgaaaagtggcccccttatctgtccagttcttcaagccaaaactctggacgataccatttaattcttcctttccttcactttccacattcaatccatcagaaagtcctgctgattctaatttctgaatttttcttaatccatttagttctgtccactccactcacatcatttctgccagtctaagctgctagtgtcttatgccaacagcactacagtagcctcctgtctgatcccttctgaacctctccaaaccttttttacacaaaagctatttttggtttaaaaatcctagaagatcatgtcggttccctgcttaaaccattcagaaacttctcatcatgcttagaatcaaatccaagctgagtatcatggcccatgagaccctccatgacctatttcctttccttctctccagtctttcttcccgccactctcactctttgacttactacattccagccacatttgcccaattttttttttttttttttctgagacagtgtcttaccttgtcacccaggttggagtgcagtggtgcaatcccagttcactgcaacctctgcctcacagattcaagcaattctcctgcctcagcctccctcctgagtagctgggacaccaggagcatgcctccatgcacagctaatttttataattacatgtagagagggggtttcaccattttgaccaggctggtctcgaactcctgacctcaggtgatccacccacctcagcctcctaaagtgctaagatttcaggtatgagccaccatgcccagcccatgtttgccctcttgcttctcctgaaatagccaagctcttcctcatctgaaggcttctgctcttgctctttaatctgctacaaaaatctctttccttgcttcttgctctttgcctggtgtcttcctttacctctttcttatcccagattaagtctcgccaccttttgaaggccttttctggccaccctgtctaaagtggtcttcctgtcccaccatttttctccattgtcccatcctattcagttcattgaaaatattacgattgctgattcttggtgtatttacttaacaatatgtgttttcttgcctgtcttttctactagatttgaaatcccatgggggcaggataccatgtctactttgttcacttagcatcataagtgctttccacaatttttggcccatggtaggcactcagtaaacattagtttaataaactaatctaagtcttccaataacactatcaagtagatttttattatcctagttttacaaataagaaatttgagggcaggcattatttgtattactcatactcagagtagagagacagtacggtaaccaggccaatatgtcagagaagtggagtggggacatgaaccctatagttcctatacaaagcccaatctttaattgctcaattcccatgacttgaaaaacaagcaattgtgctcttgagggatggagtgttgtaaagggatgtgaagaacagaatgctccaacccagacaggtgtttccccctccttgaactgatgctgccactccaagagtcatatcctcacccaattaaatccagatgcaggaaggtagggatagacaataatggctcttcttcatactttccactcagaaaagaggaaaatagtttcctgaagccttcagtggatatctagttacatttcattagccagaatttggttccactcccactactatcatttgcaagggagaccaagattgccactcctgatttacgttcatcaccattcatcatcacctgggctaggctggttccacccaaatgtatcaagattctgatatctatgatggaagggaagaatggctattgatcataccagcaacagcatttgccatagaaattgaattactctaggttcttttgtcccactttattctagaaaatatggatgttatggattaagtccatggactaagaaacttagagctcaatctgatgatactgagtcttgaaaaagttagtctactcttctcagtaattgatgaacccatatgttgtatccaaatagttccaacctcccagcaaagcataaatttatatacctggcatagaataacaaaaccacacaacataacaaggcattgtcctaatgataaacctaaaattgtcctgatagataaatccagccatgttttaaattcagcactttataagcaacctaaatatgctaatatcaaaataaatcccttttggtaaacctcagtgttaccttgttctcttccccataaagacaacttttattttccataaaattcaatctacatatttctgttttaccagcagtcatacaagagttgttgaaaattatttatagatgaatagaggcaagtttggcgttgcagagctgagctttggctgcaaattgggagactgggttctggtcctagaacttccaaaaactagctgtatgaatttaggcaagttacttcatttcttctttggtaaaatatggagattaaaaggattatatctgataacccaattgaaaccacttgaacaatatattagtaacggtaattgattctagctgttacaacaaatggcccccagattatagtagtttaacataattaaagtttatttctcacctaacagtccagttggattcatgaggcatttttgctgtctttcctccaggcagtgtttcaagaacccagctccattcatcctatgatgccaccatcctcagcatttgacttccatggctcctgtaagagaagagaacatgaagaacaaaacaggaggtttttatgggaggcatgtcaatttgaccagatactttgcccagaaccttgtcacatggcctctgcctaaatgacaatgaggctagtggctgggtgtggtggctcatgcttgtaatctcagcactttgggaggctgagccaggagggtctcttgagcctaggaattcaagatcagcctgggcaacatagggagacttcgtcgctacaaaaaaaaataaattaaaaattagctgggcatagtggcacatgcctgtagtctcagctagttgggaggctgaagtgggaagatcacttgagctgggaggttgaggctgcagtgagccgagatcacgccactgcactctagcctgaatgacaaagtgagaccctatctcaaagaaaaaacaaaaaatgagtctgggtaacgtagcctgtgagaccagaaagaagcatcaggattggcgagtattaataccatctctaccataaacatttttggaaatatttcttttttttttttagagaaagggtcttgctgtgttgcccaggctggtctcaaactcctagcctcaagcaatcttcccaacatagcctccaaaagtgctgggattacaggcatgagccaacaagcctggccctagaaatatttctttctctaaattcaaagtaactagggggaatattaatctcattctaaatattttattttgtcactccctatcctttgttttcaaacacctcacactactattatgtgttatcacgagtcaactgtttacatgtctatctccagctgttggttgggagctcactgaaaaaggaaacctttgtaattcatttttgtatcctgagggcttagcacagaggctggcacctgttagacctaagaaggattggcaactctggacaaatcagagaaggagcgttgtcaacccttttctcctggtgatgatgatggtgatggtcaatgtccactcccaaatatctatattgggaagaggtggtttgtagggtgagcatttgtcttttgagtgtatacttgagggagggatgaaattatgtttgttttatactctagaaaaattggctaaaacagcaaatgtaattttacagaatgatggagagggcatactgaggtgggaggcaaataatagaaggagatgtaaaactgtcaaccttgatccccacagtgatgggggatgatgacagcaggagtaagttatgggatgattgtatgtttgtgaacctcagttcttctgcagcatgagctggcaggatcctctccttgaccacctcaggtgacctgctggagcccactggtctcaccaggagaggtcatcgggccaccagaccaactgaagtaatagttcttcttgaggacagtctctagctccccctctatcccatcccacagtccaaaaatgctacccagcatggcctaacccagagtctacccccaaataagtgattctgcaagttgctagaattcaaagatgctcacaccccagaattagaaaacatcactgtggcagtttcaggttctcagcaagcagaccaagaatgcacatgtgagcttcctttatttcaagttaaggatgcattttcggtttttaaagttcaacaataataaaatcagttgaaagcccaacttctagagcagtgctattcaatatactagcactggcctgtgtggctatacaaatttaaactaatcaaaactcaacaaaatttaaaatgcagttcctcagtggcagtagccacatgttaagaactaaatggccacatgtggctagtagtcaccttattggacaaggcagctgtagtacatttctgtcatcacagaaagttatgttggatagcattcctctagaagctgcttccgtgaagctgtgtgccagctttctaagtcaagttctgtcgatcctatttggtagaaaatatgataaatgttttagaaaatcacaagaggacttttatttggctgaaatttaaacatatgcatgcaatttcttaaaatatattttacatatttgaaggttcagttcaccttggaaagccaaatttcacatctacaatatgaacaaaatttcaacttcctggagctcagtgataattatggattataggttaaaaataaagttaataactcctaacaagagcatgagcaatgtaagactttttccaggtaacattagaagcaagaaataactaaaaaaggacattgcttatttttaagggtattatctccaagtacatatcattttaaagaataaaattttgtgttatctttttcaaagcacagatatttcttgtacatgttaaccttctaagctgcacaataagatatgacatcgtttctttccaagaaaagaagttagttcacctaagagaaaaatgaatcagcctggatcctattttattattggtccaggagaagcaaggaccctacctgacttcagggagaccatctgggctagttattagagctgtttataaaaccctggctctccttctctaggggtgtgggagggctcacttccccactccctaaagtaaaaaaaggccacatgacttggcttaaacatgagtaagagtaatgaatgtctcttccagaagaagcatttaagtaactgtgcttgattcattccccctttctctctacattgacagtcatggaatcccaagttggaatctccatcagcagataaccactagtgaggacgattaagaaaggctcttttaatctacattggacacatagcaagaggaaaaataaacttttcttatattaagccattatgagcatgaggatgtttgttactgcagtataacatggcctttgctgaccaatacctcatccaaatctaggtcacatggcaccaaatggcaacacggttctgagtcttttgtttctatgaatacaaagtgaaaaagctatatgtgtacaaatcaagaatcagataaaggtgaagaatcaaacttgacgaaagcaatcctaggggctgggcatgctgtctcacgcctgtaatcccagcactttgggaggccaaggtgggtggatcacatgaggtcaggagttcaacaccagcctggccaacatggtgaaacccaatctctactaaaaatacaaaaattagccagccatggtggtgggtgcctgtaatcccagctacttgggaggctgaggcagaagaatcgcttgaacctgggaagcggaggttgcagtgagccaagatcgcaccactgcactccaacctgggtgatagagcaagactccctctcaaagaaaaaaaaaaaaaaaagcaatcctaggtctgatttcctacagacactaaacatagaaagaagaaatggctcattcatgtgagcacaaacagtaaagaggtttatttaaactctgctgtgagcttgggcctcctttcctgcctggttgaatttaaaaataccatatagactgtgtgtacctaagatgcttttcctacaagagccttaaaattttcatttctctctttctagatatgctgccaagagaatttttttctttaagaacaaataaactaaagaaattaacatccagcttgctgagtcacttgctttccacttgaattttaactacaaggatctgaagacagcctgtgttaggcagagaaagaaagagacagagaaagagtcagggagaagagaggaagagagatgtagctggagagtcagggagaaattcaaagagatggagagagagactggttctggaaagaaaagataagttaaatagaaaaaggaaagtaatctttgaaaggtttgtttaagacatgtattttcttactctgtagtgggagcgctgaataaaaatatttaaataaaagctgtaatgtgattaaggtttgagttggggtttaatcgtggaaagagcaaggtatttagagtgaaagatctaacttttgtatttatttttcattttttagtgttttcgcttttttaatcccaggtcctctaccattgactatctgatgttaacaaaatcagttcgcttttgtgtcttggtttcctcatctatgaaaagggaatagaaaaacttaccacataagttggtagggaagacacaattctataaaatatattggatgatctgtgaaaccacctgacaccaaaagggaataataaattcccttctctcttctttttctacaccatctctttttaattctaccagaaagttcctttctctatgaggcttcttgaagactggctgtatacaggaaaactgtatttctaattctgctatttattggaatactaggtcaagtttttcctccttcttattctatttaatcttcacaataaccctacatgagtttatcttcattttacagagaaaacagaggcttacagaggttaaaaaaaaattcccaaatccacacagatagtcttttagtaatctattgccataataatacagtattgaaatttcccccaaattcggcagctcacaacaaccattttgtgtgactcatcaacctgtgggtcaacttggccgttctgctggttgaagctggcctcagcaggacacactcctgcaactatagtcatctgggctttggcaaatccctttagtctatagccaaagagcaataagtgagcagcaagaaactgaattatctctgacccttttattaaataaaatgctgatcttgggccagctaactaaccttccagaaccccatgccaaggctttcctttggtccagtgccttaaacccatgcagtcctggggtagagaaatgaggaagcccataattctggcagaaaggctgcctctcattcccaaatacccctgagagagatgaatgatagcaggatggagcctgccaagggcacacagacagggcatacagaatcgtccaacctctcaccaattcaagggcagggcaattaagaggccagaactcaccacagctagaaattatttacgttaatgctttagcacaatgtggtccactaaccagcaacatcagcatcacatgggagtttgttagcaatgttgacttttgaactccattccagacccactaaatcagaatctgagaagcacaggttcagcaagaatcgcaccaggagtataccactggaaaagcatgtgtagccagatttactgtattagatgaattaacgcttcaaggcccagcaccttactgagtttctgacctcccacccaagcactcaatactttcccctgtcaattggccctgctctctgggatgagtgcctggtatttttgcttgctccgtatgcatttccttcttgtttgcctcattctgatttttccttgaaaggagtttccttccccactcctagtcgatgtgtgtcaggttgacttatcatggcttctgggaatgaatatatgacccaggtctgaccaattaaaaaaagtagggattttgctggaacgattggaaaagtggcatgttcttttctgctgttgatgataattggctgagtctatctgagaatgaaatcaacacagagatgatgagagataagttcctgatgacattgtttgagcacctaaatccagccttgcttgaaactatagatctgattccagattttttaactgcatacgccaatacatttccttttatgcctaagttattgtggtctggtttctataatttgcaagcaaaatggtcctggtctgcaaagccaccctatgttgtaagcttgatgcccccctcacaagtttttgcctcaacttcctgtctctcttctgtttccaatcacctgtgacagtcattttccaatttccaaattacgaaatttttacatattatatttgctgtcataacacaagtgggaattgaccccagagacttgggatagacacaattcttcaataacatagaataggcctgaagtgctcagttctgtctagaagctcactactcaaatatatactgtgggggaaagtaaccgcctgatggttaaaaggctggccccgtatttcctcctcttcctcagtttcctcattcatgaaatcagcagacattttggagatttacttcagcccagactttctaagacactcatagttaggggttcctggtttaaatagattgcgacaacttaacatgcagcttaacatgaaacacagatggcagaaaaataaaaaggtgcctctatcagttacaaagaaattggttgggcgcagtggcccacgcctgtaatcccagcactttgggaggccgaggcgggtggatcacctgaggtcaggagttggagacgagcctggccaacatggtgaaaccccatctctactaaaagtacaaaaatttgcccggtgtggtggtgggcgcctgtaattccagctactcaggaggctgaggcaggagaatcacttgaatccaggaagtggaggttgcagtgagccaagatcatagcactggactccagcatgggcgacaagtgggagactccatctcaaaaaaaaaaaaaaagaaagaaagaaaaagattggctagaccctgtgtgtggcatgacatcctattccaactaaacacaatgttctattttacaaataagaaaacaagctaagagaagttaattggttttcaaaaagtcacacagtacagacatagcagaggaagaatgagaacctacagcagagttgagaaggttcaacagaataacgggtcatgtttgggcacttgtattctggagctggcacctgggtcctggcacttattagctgaatgtccttgggtaagatatttaactgccctgtgtctcagtttactcatttgttcaatgggcattataatagtataaacatcagaaagttgtagggggttaaatctctaaagtgtttagaatgcttgcaacttataacattttatatgtgtgtttattaaataaataaaaataaatctgacttcatgtccaaagtatatttttcataccctgcagctgtcctgtaccagaaatatctcttcccacaagatctctttaacgacctggcaatgtgtgtaaaacctcaccttactcaattcttaaaattactctgattttctagcttggtgagaagtctctaaatgcttactatgaattagttacctgataatctatccttagtagaagctatctgccgcagcagattaggtcactagggcttcttgaagggagaaaggaattagaaaaaaagcatcgagtggatggaaagaaccagaaagaaacaaacaaggcaacacctattagtttattcatggttgacccaaggaatagattgaaataccagatgcacctgaaaaataattttttctcactctggcacccaagctggagtgcagtgggctgggtggaggggggaggtcatggttcactccagcgtcaacctccccagctcaagcggtcctcccactcagcttcccaggtagcagggaccacaggcatgtgccaccacacttggctacttttttaaaaaaatttttggtagagacaggatctgactgtgttccctaggctagtttcaaactcctagactcaagcaatcctcccgttcggccttccaaattgttggaattacaggtgttaatcactgcacctggcctgattttttaattatcaaatcatgttcagaactcacttcaatccaattaactgaggatttctggaaaggttacccaggcatcagtattttttcactgtgataaaatacatataaaatgtactataataatttactttaataattgtcttgacaatttttaagtgtagagttctatggaattgagtacattcacatggctgtgcaaccatcaccaccatccatctctagaactcttttcatcttgcaaaacttaaatgctgtgcccgttgaacaataactttctcttttctccatcttcaccctgacaaccactattttactttctgtccctatgaatttcactactctaggtacttcacgtaagtgaaatcaaacaatatttgtacttatgtgacttgcttatttcacttagcatagtatcctcaaggttcatccacgttgtagtatgtgtccaagttttcttcctttttaaggtggaaaatattgcattttatgtatatgaattttacatatccatgcctccatcgatggacacttgggttgtttccctctttggctattgtgaataatactgctatgaacacggtgggcaactccctcttctaaaccttgctttcaattcttttggatatatacccagaagtggaactgctggattatatggcaaattatttttaatttttcaaggatacatcttactgttttctatagtaactaccattttacactgccaccagcaatgcacaggagttccaatatcactacatttctttcaatacttgttattttcaggtttttttcttagtatctattctaaggggtgtgaggtggcttctcattgtggttttgatttgcatttctccaatgattagtgatattggacatcttttcatgtgcatattggccatttgtatatcttttaggaaaaatatcagttccaatactttgcccatttttgagatgggttgtgtggttgttgttgaattatagctttttatgaattctgtatattaattctttatcagatatgctatttgcaaatattttcttccattttgtgggttgtcttttcactctattaattatttcctttgatgcctagagatttttatttttgatgtagtccaacttacttttttttcttttgttgcctgtgcctttggtatttccactttttttggctattggacataatgctgctatgaacatttatgtacaggatttttttgatggatatgtgttttcagttctcttgggtttatgcctagaagtagaactgctgcatcatatggtagctctgtgtttaagtttctgaggaactgcaaaaatgtttccaaagtggctacaccatcttataccttaccaacaatagataagtgttatatattctccacatctttaccaacacttgctatttttcatcttttagattagagatatcttggggatgtgaagcagtatctccttgtggttttgatttgcatttccctaatgactgatcatgtcaagcatttttcatgtgtttattagccatttgtaatctgctttagaaaaataattcttaaatttttttctcatttttaagttgtgttgtctttttattgagttgtaaaggtcctttaaatactctgcatagaagtcctttatcagatatatgatctgcaaatattattttcctttttgctttttgccttttcatttgtaaaattgtatctttagaaacacatttaacttttttttattttgaggaagtcaaatttataatttgctgtcatttgtattttggtgttcaatgcctgatccagggtcataaaaatgtgcacatatgttttatgctaagatttttatagttttagctcttaaggttttgatcaattttgagttaatttttttctatgatatgaggaactgggccaacctcattcttttgcaaatgaacctcattcttttgcatattttgcagttttctgagcatcatttgttgaaaatactgccctttccccattggtcttggagcctttgtcaaaaatgatttgaccatactatatgcaagcatttatttctggaccctctattctattccattggtctgactttatgccaatactacactgccttgattatgaagcttcattgtaagttttgaaatcaggaaatctgaaactgcaactttattcttctttttcaatatcattttggttatttagaatcccttgagattctatatgaattttagagggatttttctatttctgaaaaaaaatgtcaatgagattttgataggaattgcattgaacctatagatcacttcgggtaagttagtttttctatatggtgtgagaaacagatacgccatttttttgcatgtggatatccaattcttgcagcaccatttgttaaaaatactatttttttccacattgaattctgttgtcacccttgtcaaaaaataaattaatcataaatgaaagggttacttctggacatttaatctgatcccagttatttgtttttatgttggtgtcgtaaagtctttattactatacctttgtattaagtatggaaatgcggaagtgtgactcttccaactttgttcttctttttcaagattttttggctattctgggttacttgcattgctatataaattttagaaccatactgtttattttcccaaaaacatttctgggtttttcagtaaagtttttgttttgttttgttttgtttgtttgtttggagatgatgtctcgctatgttgcccaggctgggcttgaactccgggactcaagggatcctcccacctcagcctcttgagtagctgagattacaaaggtgagccactgtgcatagctgggaagtacaattaatgtgataagtttttaaaatctagttcaaattaatacaaacttgattttgatagtacaccaaaactttgctctgacatagctctattccctcctccctccttggtgcttttattttcatacaaattacatctgtatacattataaactcatcaacatagttttacaattattgctttatgtaatttcgatcagataggagaagaaaaaaatacaaaccaaaataacacaataaagctggcttttatatttctctttgtacctacctttaccagtactctttattgttttatgtggatttgagtcactgtccagtctctccatttcagctgaggcacttcctttagtacttacagggaaggtccgttagcaacaaattattttagttattgttgctgttttccttccttttgaaggataattttgttgaatatagacttcttggttgaatgtctttttctttcagtactttaaatatgagcatgtcatcccactgtctctgtggtttctaatgagaatcttaatcttattaaggatcccttggacataatgagccatttttctctttctgccttcagtattttccctccatgacttttagttttgattgtaatgcacacagatgttgatctccttaagttatcctactggagtttgttgagcttcttgggtgtttagattaatgttattcctcaaaattttgttagttttggccattacatcttcacatgttctatttacccatttctctcatctccttttggttttcctttatgctgacttggtatgcttgatgatgtctcactgatctctgaggcttcattagcttttgttcattctttttccattttgctcagactgaatcatctcaattgatttatctttgaaattgcttgttctttattctgccacctccaatatgttacggtgcttctctaatgaatttttttatttcagttatgatatttttcaacttcgaaatttttatttgattatttacaatacctatttatttattgatatgctctattttgtgagacatctttcccatatttccctttagttcattggacatgggctagttcattagttctttaacacatttataagagctgattttaagtccttgtccagaaattctaatgcctaggtatcctcagggacaggttctcttgactgtttttctcctgcatatgggccacatttgtttgtatgtcttaatatttagttaagaactacacattttaaataatataatgcggcaattctggaaatcagatttctaccttcatcccacagcatttgttactgttgctatttgttactactgttgttactgtccctagtaacaatttttgtcttaaattctattttgcctgatatccactttatccaattctctttgattatttgcattgtatatatatttcatctttttttttttcaatctatttgggggagttttgtttgattgttgagtgattttgctgaactactttggtaagtcttctttattgtgtatggccctgaagtctctactcagctaatttaatgttcagctcatgtttggacagagatttccctaaataccttgcaccaataaggctcacagtctttgctgagaagttctgtgtatgtattttttggagtactctttcaatgctccaccaggcaggttacaaagctgccttagtctttgcttcctgatgatgcagtctcaggttatggagaggtgagagaagagggccttctcagatttggggcatgcacccagctttctgcatgtgcatggctttctagattcccagaaatacgtgagaacttttgaaaacaccctatgaacatctcagtttccagcatttcctgttatgatttttggtcaacttcttatttgtcccagctgttaccactgcctcaggcagctgctatgtgaaacatttgatgctgattgtttttgactaatgctttggggagataatgtttatactatgtgagttctaagttacctcaaataaagataagcttcaagagtggtagtttttagggaactttttattttttatttttactttttttctttccaacttctatttaagattcagggggtacctgtgtaggtttgttgcatgagtaaattgcatgtcatgggggtttgaggtatggattattttgtcaccaaggtaatgagcattgtacccaataggtagttttttgatcctcaccttcaggaaattttcagacaagttaaatagtgacaattctctctggatgggattctggggagctccaaatcaattctgttaccctccaaatggcatgtaggtccctggttttcaaggttgctataaagctgcagaaaggggaatggcaatagggcaagttaaatgccacaaagtttcttgttcttacccaaaatgtagacatttttcttgaataaatgctcctcagattgttgcaagcctttggttaatttccagatttctaaacaaaaaaattattttaacaatttttgctagtgttcttgttgcttttatgaaggaatagattttcagaggtccttattcaaccatccccaaagtggctctttcataatcataattttattattaaaatgttggctccaacagacctcctgaccagatgtcagctctcatgtctcatatttccattttaatctcagtatctttccttaacattgcctagaaaaacacaggggttaaaaatacatttcaaggaatctttcttttctccactttaaaaatcaataccgttttgttatactgaataagaaaggttatggagtttccaaagcattataggagaggacattgaagacagaattttgcagcccacccaaaccaggagagcttgcataaaagctttttgaaataattttgttactgccattcttttaaagaagagtaacacattcacaggaaaacaataatgaagattgtttaaataaaataaaatctttttgcatcttactcattatccttcccaaaagtaaccatctttaaatacttcctcttcaagttatctttggtgtttccaaccttaattttaaataatatctttttatttcttgatttaccaattttaaataatatataaacatcctttatgaaaaaactgagaacgttatcttgttggctctgtctcccttattacaaccactgaactttggtacttctattactttttgggtttctgttggctaactttaaaataatacatataactttatatatgattataccatcagtaaactttatttttccttttatgaactttatactgattattttaatcctttaccatataaaatgagtaaattgcggtgtctgcattataaagtctctttacattgcccctcctaagccctctcctttacttcccacatctgacagctctctcactacttctatatgttaggtcccataatattcagattctgtttggtaaatattaagtcatttattcttggtctacagtttaatttaaacttcaaagatcaaaaaagagcatttacagcttatgattatatagatagtatttattgcagaaccaggtagggtggtaaaactttaaagaaaaaatgtctctgtggcactaaattttcacaccaaaaaagaaaaaaaaattgaagataaaggacaaataaaaaatatttccttaaacgccatcaaaaaatgctcaaaattgtgtcgtataattgacttcagatttgaaccaaaaatatatgatatagcttttgtttttcctgtcattataggggcattttcttgttattactgataggagatatttatgccattgtctggttaatactataattagcttttaaactatactatttgtcaaactaattttactctgatttattaccgtatctgtttcctagctttggtcctaggaaaaaaatgctaccttagttctaatatttcctaagttcctggtcttcctcctttgcatagattcctttgtgagttgtattgttaaggtaaaatccttagaaaatatttttatttgcaaaaaatgttcatgggaggtaattgtcctgagtctgtccacatcacatctagaaatgttttcattttgcccttcgctctttattaatattctggcttaatatagacttatagatggagatttatttttcttgctgtatttgaagacctgttccattgactcctaccacctgaatttgttttgagaagtccaattttgctgtaattcttcctcctttgtaggcgaccacctctttcttctctatgaagcttgtaagagcttctttagggaaagtgggaaaatatgcaaaaaaaaagaagcatactcattatgtggtactacttacagtgaacaatatttacctagatatattcatggcagagtgactatttaacacacagttgtgttattgacaggatggggagaagaaacaagggtgatgtaagagagcctcattattaggaagtcaactgatgtctattttataaatcaagaattagcaatgtctgcatattatttggaaacaaaaaagaaattaaccaaagcaaatgcaaatgccattgaaaaccattgcctctgggaaatataatatagatgtagctataaacacatatataatgtcaacaggagaaaagtgctatgaagaaaaatagtgcagggtaaaataattttaaaaaatagaggttagcaactttagcgagtttagattgtcagagaaggctcctttgtaaatgtggcatttgaggagatgagacatgagacgatctgggggaggctatttcaggtagaaacactaactagtgcaaaggtcttgagataggagtgtgcttggttgttcaacggacagcaagaaggccaacgtgattggaatggagaggtgctgggaaatgagttcggaaaggtggccaggagcatgatcttgtagagtaaaggaagaacttctaagtgtgatgggtgacattgaaagttttagagaaaggaaatatgatcagatttgtcttttaaaagtatcactgcagcagctatgtagaggagatacaggtgctagaagacaaattaagaggctactgtaatatcccaagagagaaatgatggcgacttaaactaaggtggtatccgcggaggtgctgaggagtagttggatttgaaaagtattttgacaatagagcaacaagtgttatttattatgtgtgaatataaaaaatatccttgaaataatataagattttcatcctcagggactaggaatgtcaatgccgttcgctaatatggagaactaagatgaagggagcctcttgaagttaaaaaatctgaaatctgctttggatatgctaagttagatgtccatatttgccttatgcttaagtacagatattgagtagaaacttgtgcatacatgatgcagtccaggagcaaaattagggctgaatatgtaacataaaagcatcaacacatagacactacccaaggccttggaaatggatacacttaccagggaatgattatgtagagaggagagaagttccaagtcttgaacgctcggagttgagaaaatgaaagcaaagccagcaaaggagagtgaaaataagatgcttgtgagtatactagtttggaagatgggacatcatgagaaaatgttaattaagaatgtaagaggcgaagtagattcttgcagagtatggaaccaacttatgcatatatatgttcagtttgaggtgcctttgattcagccagataagagtgttcattaagaagctaggaatatgactttgaagctcacaagagtgagtgagactggcaataggaaattaaaagtcaaatatataaaaagatggttaaactcaagggtatgaaatcagattttttgaagacaacatatgaaggaagatatagaacactgagtctcttgaggtaccatggtcagtagagaaggctgaaagaccaatcagaattctgcattttctgatgtagaatttagagtaggaagttttcagtacctattctaactccattaccaactggctgcatggtataagataatcatgtattaattgggaattaaaataataattactattatacatacctcagagagttgttgcaagaataaaatgagatcatgtgtgtgacagttctttgcaactttcgtatttctttagcacagagctatataaaagagagctatttaatttttttctctttggcttagagcacagaagctttcagggtggagagtcaggacaggttctatggacatatggagctcccaggggggcttgtgcaggactcaaggaaatgtccagcttaacctgctgggcacaacaattttgctgcttcaacccatctgctatggaaaatgaggagccaacaaaaaagggagaaacagaggtgaaggcacctgataatgaaagctttaagaaagggaaggggtaagtacatgccgtcaggtgaacccagaagtcaataaagatgaaaagtcctttggaccatgaccaagagattattgatgcaatctgctgatgtcttagaatgtgccttgcctaggctggtgcctgtgagctggcagaagtgtgatgcccttctccgctagtatcaataaaatcgcacgagatattcttgccccattcccaggtatatcctgagtcattcatttcaacccagcttaaccccatcctcaccctcagagttcttcacccttggaatcaattcgtgttgaagacctcatatcatctgcctcaaaaccactgatccacattgccattctgttctgacctctggctgacttgcttaggtatattttgagagcattttctgccctgattcttatttaagctgtttattggatattgatctctgaattccctccttgattgtaatttgaactctcttcctttgaatatgttgtttctgttcacctcaggttaacagcctagacttctttcttgaaattcgccacagcgaaaccttgtgattcagccaaccaaaccagtaattcatactcatccctctagcaaacgaaaccctgaagttgctaatgagaaaaggcatatgcaagccacagtgtgttgaggcagagaaggtagctgcagagggcagaaaggagtctgatggagctggaggaggctgtactaaaacatagtgattatgagcttgggccctggggttcaaaccccagctatcccatttcttagctgtgtccttggcctggttatttaaccgctctaaccctcaactctctactcaatttttcctagaccccagtgctaagcatatggcaggtgttcgatattgagtaaatgaataagttcatatagatgaaaaaaacaaggcccagtatgattgatacatatctaattaatagctaatgaaaaaaatggcaatcctccatattaaagccaagctacatgtcatttcttagagaaataaagttaaagtctcatcaaaatgatagattttatttagccaatacttcatagtgctagacatgacactcagtgcttcataatttccttgtgtatttgctataattattgtctccattttacctatgagataattgagatacaaagaggttacagaactaatatgattcctaaaagatttactcaaggaatactgtgatccctaacaaatagcctttttgaagtgtactaatttggactaccattttctctgcctctctgttcctaattgtcacaggttcttcctccctactggaccacaggcgtgtctcagcattgggaagggtcctaggatgcattgtaaaagaaagtctgtaattttggtgcatcaaggaacaaaagtgtggaaacatccagcctgtggctgctggacactccccttcttccttctcaccatactgtctgtaataaagaataaagtgttatttaatattctgagtgtacagtcctattttttcttaacctggcaaaccagaaacagcaactaatattcctggttctctttttacctttcacaagatctatatctaccttagaggcttcagggaacaagaacagcctggatagtttaaacctagagttaaactactcgaggcattttaaggtaccgctacttcactatatataaatggggtggggggctggattaagggctagaagaatatatgaagagaaagtggcaagcaaaccacttggaaagcaaaccaaggaatcaaaacagttgctctatcaaactgaatattcttgcgcagaactgaatattctttgccctcacagtgttttgaaacattgtcatagggtgccaggcatgtcccaaaggaggaccctggagagagggcttctgagctgggctatctctaaactgcttccaagttgactttggaaagatcacatgggattttagaaaagttattattattatgacttataaaattgtagttattgagtcaactatgaatcttgcaccttaccttggagatacaagctaaataccttggacctagagctactgcaaaccagaatactttggggcataatgtaccaaaaaagctttcagaggcttgaattatcacagtgtaaatatccatctagcagagcaggtaattttctcgttactcatcctaagcattagatactctgtgtgttagttctttgcagaaataacccatagcagctgaaccattttggaacaaattttccatcaccttccttccctgtgtggttcaggcctttgcaaaccctgagtatcatgaatctgctggttctctactggcaaagatgatgacgttttcttgtttgtttttgttttgctttaatcatgccgtgagaaaatcctaagggaaaaaaatctcattatcctattcaaaatacatttagggttatctggtcatccctagcagatttttatgtacccaatgtttatgtatctcaaattacactctgttacctttcccagagcaagatgaagaacctctaagaacctctcaaacagcatcattttcacaacaagcactagcaatggaaaacattgtcaccaccaccagctaatcttgtagggtccatggtattttctgtaatgccttgaaacagtctgcctctctcttcttgtctgtcatttttatagatgtcagtgtggggcatcagcagttgaaaactcagaataccaagccagtccttccctgtgactgctacatagcttttgcctgcaggataagcctccatcactgacgtagttgctttttaacttcttttttttttttaacttggaaaatcccccacctcctccattccttcacaaaactttctgcctgaatgatttctagtctgagggccatacacacatttttttttctccctctgcaggtttttttttctcttcaaacttccgcatgctgcctttttttaaagtgtcacactttggaaaaaattctgactacaaaggattttgcagtacattgcattcaaacccctttccccctattccaacttgctttataatgaaagtaagagccatactcaagagacttttattggcaattaagtatctaaggactttgcagattttcttctttattgtatggcaatcttaaatgtttaatgaatatttaagtaaacaaatttcagcaacatgccttttttaggaatttggctttaattaacatccaaacactgttaattattatggcaaaaacatcaatacgtcaaaaaaaagccttcaggccagggaatctttaagaaacaattatgtctactaatttcgattaaaggtatcctttattaaattcttaacaacccgtctctttctaaacgcagcgccttcacaactcttcttcccttccccctaccccgcttccctccctccgcaatggagcgcaatcaaaggccgtattattgcctaagcttggctctcaggccagctagggatgtgtgtgtgtgtgtgtgtgtgtgtgtgtgtgtgtgtgtggtggggcgggggtggggggcgagggtgcaaggggagaggttgtacgccgcttttccgaacccagctctaaatggtttctcctaagcgagacaaggattttccatagcctaaaagaggccatcaagttttaacattgcgaggcacgacttctaatcgcatccttcccggaaaagtacaaacagttcctcagacgaggtcccccacctcccacgcgctccccagccctccctccctgcggagagccccgcgacagcctccccaacacctgtgaatcatccgggaggctgccaccgccgagcgatccgcgcaccacccccttcccgggcccgggcacggccagggaggacagttagggttgttgctttataattatcacttttaatctctaatacgaccagcacaagtagcctttgtctccccgccctgatttgagcatccgagggccccccgaggcagcctgcacgggtaccccggggtttgcgcactgagtgaacccccagattcggccgtgtcccagccgtccttgctctgaatcccccacctcctcccggccgtttggacggttccctcggggcgtctgtgcctccgtggggtacccctaagacacccagcatgaaaccccagcaccgactgcaaattccaccgaaagcagagtcatccgtttttgccctcggcaaacaactcaacttcaagcctcgagtccttgcaaacccacgctggctgggctaactccgcttcccttctccttcccccgactcctgcaacagctcagagagcctggctctgacgtagttcaaaataacgtgcgccagcctcgctgcccggctgaccacagcaacgagagccacaagccctcgacgctgcttcgataacatgaagcaatcactcataaaaatagcaacccacgtagcctggccatatatggagctggcgagggtggacggggatgcccctacggaccctcttcggagaaaacaaatcgccgctgaaatttcccccacccctcccatcactaccttttacccctcctctgccttcccctctccttagatgactcaaccacagattccactgaaagggggtgggggtgggggtgggggggaatatatacacatacacacaaattatacatatattatacatgtattataaaatatacacacacatacatatatacatacacacacatatacacatatgtacacacacacgcacacacaccaaagaacatcaggaatgcagttgcgggatgaacgcgtttgcccaagaccgagtgttaaaatggagtcataagagtcgccccgtgcgggtgtttatagaaggtgaaaacacgcaggtttgcaggccagcgcactgggaaccgagtcaagcgcgccgcagcccgggccccgcccccgcccccgccgtgccccgcccccacttcctcccgcccctcgctgggcggctattaaaagctgctgacgtcaaaacggacggccatctttgatgagggcagagctcacgttgcattgaagacgaaacctcggggaggtcaggcgctgtctttccttccctccctgctcggcggctccaccacagttgcaacctgcagaggcccggagaacacaaccctcccgagaagcccaggtaagaacccccctccccaggtcgtggctctggctcgggatggctgcatacccagaagggacagcagctgggcagtccgagtgggcttgggtaaatacaagtattggtgcacttagggtgcggtattccgtgtgtgcacgtctggtgggggctttataaagtgttttcgaggtgagctgctggggaaaagggaaacgggagccctgcaaatggagcgacggggaggaagagcgagggtacgtaccgaataataacttactcttttgaaacagtagtgggaccccctctttcttccattttgcgatgcagttttcagagatatttaggctgttgagttttcctcccctgtcgttctaaccctattattatgactgttgtcgttagggtgctattatccagggaagaattaagggggagacagggtgtgggtgctggggaggcgaaaggagaaagggggagttcccgccccgggcaagctgagctgctgcagcgacagcagcctccatgccccgcggacttgatttatgccgcctgctccacgtcaactgcaggctggcgggaggcgggcgggtcgtgccgggtgggagggctctgcggagggctggcgcgggtgggctggcttcggggactgcggcggcccgcgctcagcaccctggatagcaacaccgagggctcgcgcgggcgccctcgacctttcagcaccggggacagcggtccggccgcagcgcctcatctgcctgcggcagaaatgcctggccggggctggatgtgccagggctggagaccaaattgtctccctgagaccccggtcttacggagacccttaatagaggagtcatagtagcttaaaagaaaacaagaaagaaataaatcttcctcacagagactcctttgcagacaatttcctgttcccctcctcacctcctgcatagcttcaacaaaatagtctacttgtggaaatcttctgtgttgccctctgacccttattttacgtagaaaataaatacattttttaaaaaatatggatttatcctccagcagggtatcaaggtttttgtttggttttgttttttaacacagagtagatctgtctacagatcttgggtgagcataagtactgtatatatgaagaagccaatgctatctgtttatagggatgatacatctctctctatgtttccatttgataaaaatgtgagattagctgaactaagcagaatcaactttaagaatgaatcactcttccttttccttcttcccccatccttgcaatcaggcatgaatacaagcattcatccacaaaaacacatatctgagaaattttactggtcctgtactgaatagatttaacctctttggccacggtttcagagttactggaagtatttgctatcagcactggttatcgcaggctgatagctttagattttgacaatattaagactggccttcctcaggagaatccaagtgtgtccttcagggtaatgcaggtaaagaaccatggtgttaaactagaacttaactctgacctaaaggtctactgcaatttctcttatggcactgcgggattttgctgaggtggtaataactactttaaccattttctactctgaggcttggagcatctgagagagcaaaagtcatcaggggtatttctctctgtttgatgtagataaaactggcataaaaatgaccagagtcaaaattatgccatttgagtcattagcaaaaaagagtaacagcgtcatatgtaataatctatacaatgcattaaagaaacgctatcatgatccccttaaaagaccccaaatgagaacttggattgtgtttagatagtcatacctcctatcatctgtatgctacagacactaaaattccctgtccatatacagaaggtaatttcattcgctgctatttaattatttcctagtgttttttctttttatagatgaccatgtgtttccatgtatgtatatgttgatctgttattttgcatggatgtaaaattatttgggtggacatttatatatgagtatgtaaacgtataaaagaagtttataactttgcaatctgcagacaaaaataaacaactgtgttttagtagtggaggagagaaaatatgggcaggaatctttaaaaatgctttaacttcatgctgcatgtccagacagctgtctgcgtagttgcgtcaaatgaaaagcctaatgctgccggaattacgtgcttggacattagtaattactgctgggtttgtttgctagtggaagactggggaggagcgggggaagtagaggaccgcagtgaagatggcaaagggcacagagctgagaggaagaagcaatgtgcacaattagaaagctaattttagaatagcttactgagaaatttaaaaaatatatcattgaaccatgaatttaacatttatatcattgacaagcttccagggaaaaaaaatcgagaaatttcccattttaagttagaatttttaaaatccagggcaatgcggtgagaagaggcaggagcagatggacataggatgagccaggagtcattcacacagaccctctgatgcctgtttgttcatcggcatttactgcattaccacctcagtgttcaaattacagaacaatttacaatcctcttaacctcttcatggcaaaatctcccaagaattcacaattttatttttactttgttaaacacgcacaaccacacatgcacaaacacaatgcaaactacccgttaattagcttgtctaaagatattcccaagctctaaatgttaacccttgagtgagggttatcagctgaaagacatgtttctgccagtgacacctagaagctgcgtaagcagtcagccttcagcataacacgtaggttttgacgattagtagaaacgagaaaaataatctgagaaagaggttgagagaggagacatgaaggagaaaaatagaaaatatgctttttagataattcactatgaataaacaatgtttctcacattatgggactgctttacaattctataaaagaaggaaaaatctgtgttttaagcctcagcgctggatactttctgcaatgtcatcccttgtcagcaagtaccaacctgataggaagatactgatcaatcggtattcaccggatacagaaatgaatcccatgggagttataaaatttcatggttttgtcttgacctcaataagtttagcatctagcaatcttaataaaagcaataaacaataagttaataaataaaaccagaattaaatgcaataaaacattagaagacaaattttgaggacatatgtgattaatttccaagtgaatgtaaccaacaataagtaacataaaatcaggagggcgatatcgcagtggactggaacaatctgagagaagaggcaggccttgagatggcttttggaggttgcagagaggtgggagagttctgttaagctgaagtcacaacatatgcagaatatcaagttaggcaagcccactctacagttggcaaaccctgaaaatgcccattgatttgggtggagtgggaagcttggagggaataggctgggatgcagagttggagccttctgtggaaggctttgaatgtcaagctgagaatttggtactttatcctctaaagttgatttctgagcagaagctgatataacaaagtaaccaggtctttttaatatccagaaattactattgacagagtggatttaatttgcattcttccagaagtagaggggagcaaattggtatcataagagatggttaatgaaaaaaaatcagtccttactgaagcatcttttaagactacttttcaggatacatatacctacatagacatataattcctgcttggaagttaattgcaagtttccattttccattattgactaaatgaaattatgcaagttgagcacttgccaggcagactgaaaagaaagtcaagaatctggtgatgagacaccccagaaggtcccagaaggtgcacttgaataataaacatggtgctgaacactctcttgccctctgtgaatattcagcattgtcaagtgcactgacgggaggaatgaaaaaagttgtcatttcttctgagcatgttttgagcagcatgacatataggaccagccccaagtggctaaaaatgggaggaaaaagatggaatggtagaattttgaaaaactggaatgggtagtatatcagatttctttccctgcctattttgctgactcttgctagttaccctcacttcagggctacctcgaggtctggattacacccatttcctttctaaccttgtggttactactctcacagaagagcttcaaaaatccaaatgctgacagaattgctaagccaaaatagtcagtgggttcatgtagaggaagaaatggcaacggtagatacagattttactgccatttcatttctggctataaggtatcaagagactatcctcatctattcttcactaaaacactggcagtagagacaccacaggataacatttttatatccaagctgactacctaggggaaacttagaggtagtgacatttgatgctttaggaggtcaggttggtggttattaaactgagtccaggggctacacaagcatcaagtaaggtgaaggaaggagatatgacatagcactgaggaagtaggacatgatgaggggacaaaaagttaaaaaaaaaagtcttacaagaggaaaaagacttcatagaaatttctagagaaccccagctacactgtgaactcctcagaattgctattattgccttaacaataatacctactctttctacataattttcttcacaagactctcaagcacttcacccaatatgaaagtccaaggaatttctgatttctaaataaatagtgcaacccacagacacatatgttcagatatagtattagatcacatttagtaagacataaattgatttagaatgacagagatacccaaatcagtgattaatcagaatgggcttatggggaagaatgtgacactcattctaaaagtgtttacctatactggctcactgtatcctcctaacaaccttgtggtcagattactattattatttccatttcgcagatgaaataactgatgcacagcaagggtaagtaacttgtcgcagagcagagccaagacttaaatgtaatcagtctgactccagagattaagctatgaagtgtattttatgctacctcttgcatcatccatatttttcatattggccaaataaggcatagagaatgtacatgtctttttttttttttttttttttttttttttttttttgcagtcttttcctcctcacttgggtagcaaggcctgaaggtaaggatgctggtcagagccaggagacccagctctagccctgaaacaactgcttgtaatttcctgtttggaattacacagtctttaaattagtcagtgcaccactgttgaacttggtttctttactggcagaatgatagaagtggactaatgatgtccaatatccctaccattcaaaaatcaatgaaatcagtgctgaaaaccccaggcaatgggtcctggcctagtgaccgatggcctcagctggcatcatcttaataatgcttcagtaactgatctggacccaattggaagattaattacattcatcgcctccctcatcccaatccttattttttcccccctcagaattgcttgccttcatctttctgaagccttctcagagttaagaaatcctgtcttcttcctcaaagccctattctgagtcatcactgctttgggtatctcctgtccttctcaatcagatttgtagctatctagcacatactgtctcctacaacctgcctaaactttgtataaatttctttctagacctcttcttgatcatctcgtgtgtctgacttagcaatgtattagctgcagttccctcactcatcctcttacttcttctgccgcttagcaaagaggaaacagaagcttttatagaatctgtgagctgtaaagtactttaaaagtaacattcctgtgtgacctgaatctcatgatactgatagccagctcaaaaactaatcacattgggaggatgtggggtaaaatgacatcacaggaaagctttaaaaacataggacaaggagagaaggaagctttaaagcctatgaggtcagaggtcagcagttggtggtacaatgttgattaattaaattcatagtcacacatcaaataaattcacatgtcccggaggggaaaaaaaaaaaacacattcgccttgtcacaacctactgcagatttcaatgtctttccaccaaggtaaaacatggtatcacaagaggaaatcctaactgattttcttattgttgactacagaggtcaacctcagcagtgactgacttactggtaagaacaaatctgtatccctaaaaagagatggggggaaatcctatttaaggattagcatttccttctaaatgcttaacaatgattccagagaaattcagtcaaatgatgcctgctcccgaatgatgctgaataacagctgtactgggcttatggcttgctttctttggttgtggaaaaatatatttcatcctcttctttgctgttgttgatatggttcatattactcaaagatgtctaattctcatgtcttaaattgagactgttggcactttctgctgactcattgtgtcttaatcttccaaggtggtccatttttacttaaagaaaaaggttattttcctccaaagtggcaggttctacaaaatgaccatctggtcccagcttccccatcacttcctttattcaaatgacactagtcacagatcttgaacttgagagatgactttccatgcctgtaaccttgaatcagtggtttctgtcctttactgataacagcaagtaaaaaaatgaaagtctcttaggtgcccccctgaggccagagttcagccctacactcctgcctcattcctttttcagagaattttctcagttgagctctgaaaatcctgcaagttggacagagttccctttccatgaagagtctcagaccaagttgttaatctcctttatttatgttcatctttggtacagtttcaaagaataataactggcaaattccaaaacagtgaatttcttaaatttccctgcagttattccgaagttggtctggcagctaggtataggtaaatcacactgtgacttctctatcaataaacagaaaatgcacagaaataaatgccagaaagactgctaggaagaacactggcaaactatttcaatacgcattagccttgttgagtgaattttttattttaatgggaaagtccattcctaatttatgccagagaaattgctgaatgtatctactttttccaattccatgatcactgcccatgtattgcttcatcataaatcagctgctattatggcattcttcattaattaatccattgaacaaatatttattgaacacctgccatgtaccaggaaaacatacactggttcctaaagtcagagctgtaaataaaatcatcatgtttctgccctccatgtgttatgctaggtgtcccctcttgaggtgtcattattttaaaaggcatgtttcaatgggatgccttttagaatctaagacattaattcaatgtagaaaagagctatggctctctaatcaaaatatacaatctattgaaggtttctactgagctgtcagtatctacagagagattgctatatcataaacaaatacatattaagaaccagcctcagccatcaccgaactcagtaaatatctaaggtatgtctttgtgtgaacttgtctctatttacatggcaatcaactaggatgtcactaaaatgtcccttaaatacatgactatattccagtatcccaatctgttgggatctctccctgtagagaccactttctgccgctcatgggaggaaggggtcaagctttaagaaacatggtacctcctgggccagaaatcctattcccaactccaaaactcatggagcaatgcaagaataggttgactaagaaaggatcctttggatgagagtacttcccaatccaatccactttcctcctctgaaaacttcctgtcattaaacaaagttcagtgattcgggatcaagtagaattatgtagtgattctggatcaagtagaattatgtcttaatttcccaaactcctacttctagaaattcacctcttaccaatgagcaatgcccctatctcccttgtaagattgatcacactgctttgtagttacctacttatgtatttctctttcttaatagactttggaagtctttgagagcaagggtaatatcttagctttctttgaatcttcagtacctataacagtgcctgccacacccatgtatgcaggaaataagtgagcgaatggggataccagctacccctttgcagagaaaagaattctaccactgtaagtaatcctgctttttattgatcaaatgttatgatcagaataactcaggaattgttgtgtacccttgcacatagattcatcctaaatattggaataaaattatgtcccaaggaattacttaggtttaccctaactagctgccaaactatggcaaatggtataatattctaatctgttgttttatcacttatgagtcaggagttaaaatgctaacgaaggatcaaaggattctcaataaaggcattgctaaaatcaggtttatattcagagattaaaagccattcactaagagcatttaaagtcaagcagtttagcatatatgaattataagtttaaatgttttactgttcactaggatgaaaaggatatttcatacatccatttgagacatatattacattcaccagtggggtagatttatggctttggccaacttgtgttttcagggtcacatatttgctgctgtgctattagaattggcatggtggacacaagtttttcatgtcaattccgcttccttaaaagtgtccttcagagacaccagtctctgggcttttcctctcaaatagtcagtgtcctcttgcctgggagagaatcataagcctgggcatgatttggtaaataagtcccatttgtccttagaaaaaaaccttcaccagttgagcattgaattttgcatatcttttttccccattccttctcatgaaaacacgggttactctgcatccaactttctccagagaagactgaagatactaccacttaatgaccacaaggaaaaaagtaactaacttcctaaatgtctactgtgtgctgcactgggcacttgatgtatgttgtttcctttattttccatggcagccttaaaagagttcggaacacttgtctctgactgcaaagtccatggttttccccaccaccccataaattatcccatgagttgcacaaaatacattgagatcctctaacagaaagcacactgctgatacatagaacgtgagtcagccaaatctaaaaagctgagtcctccaagctaaatagccaggtgagatatggtggtgtaagtgaccagagaaactatgtgtccaaacaagttcatggagcaatgggtggagagtcagctggctgcatgccagctctgccacttcaattgtataaccctgaacaatttacctaatctgaactgagcctcacttttatttacatctgtaaaaggagagcaattgctgccatgcatatatgtcaagtggttgtcgtgagacctaaaggagctaatgcttgtgaagtagttacctccaccactctgagaaagaggaagggactgttgttatgttcagttacctgctatttgccataccagatttccagggttctttattataggttacatgaaggccatatgcttcttttcctctttattgttgtgtttgcttaaaaacaagtcttggtatcacatattttttagcttgatcagcatgcataataaaatggggaaatatgtcaacagcctttgatttttctatttggggaaagatttttaaatgcctttgattagcatctctgctttgggaatgacctcatgtttctcagggtaatgtttagatacctgaagaggcccagttgttatttaaacactggtcccctcttccttaacatcttgtattttaaagatgcttgaggagttaaaagagatgatatgcaatatgtcctgctattctttagcttttgaaaaagaaattttctgtaagctatttagtgaaccattactgaagctacatctgttggcttcattttatattcagctttgtgttaaggatttttgttgggggcggggataggtttcttattaaatattgtgtgtgcacatgtgtttttgtatgtgcacacaatacacaagcagagagatgcaaacccagactctttcttggagccagccttgaatacaaaattcctacatgcatcatctcattgtcaaaacctttagttttattcataaaccaataaatataaaacctgcacaagcaagttacaagaatagcagaatctgtgctcctaagctgcattcacagaatgatttttctttaaggttggaaaaggcttccaaaacaaccctatataaagcaatgacttcaaattctgctttggggagaaactctacagacaggagagcttgctggggaaagattttgaaagtcacactattttttgagcatctactatgtggtagatattatgttaggctatcgttgcttgttttgtatttattttctacagcaaccttctgagtggcaggttatacttcacacttgactaagagacaatactgtttaatcaaggtcttgcaatggattctaaggtactgatcacaactcttcccccgacaaacaagttcatacataaacaggggttagtaattaaaatactaggcattttgttaagcagaatttgggggaaaaaagaagaagaaaagaaaagattacaaccagcaaccagagtcagattatcagatttccttactcctttctagttctactccaagattagacattgggacctaccaaaggagaaagggctgcagaaatgtgtgtagtcagacaggatagctagagaaccaaaggcccttctctccttttcccacccatacccccaagtgacagaacctgcttccagaaacttgcaatctgggggagcagaaaatgcaagcttgctataggcaggcagatcccagagaaaaagccaaggaggagaactgagttatacttgctcactgcttatttcccatctcacagaatactttagttgggggtgggagggacaagtaaaggaaggggtggagggaatatcatcccaacactcatcttcccaaagaacggagagtcccattttgtgggacaaagtaggaattgatgagtctttgagagggggaaaatggttccttcttctacacagttaataagagagagaacttgagtttgaatttaagatctcaagtgcaatgaccttctacaatcaatgattcattactctaggacacttgttctcaaactatggtgtttagcagcatcagcatcacccaggattttgtttgaaatgcaattcccaggccccacacagacctactgaatctgaaactctagggcgagacccagtaacctctgttttaatcatctccaggtgattctgatgcatgctcaagtttgagaaccactgccctagagatctttgttgttccttcaaaccttcacatctgtctcaaactgagcctgttgaggatgaggtgttttcactgttctcaacctttcaaaagttgtgactgggtacttagcaagagaagagctgtcctggaccattggatagaaatctccatttaccctctgatttagtaatgaagatgctatttttcttccaagtgagtttgaaggatgaggaaggtgagcattcacagagtgaggacaagtgtgtgggatgggggccaactggctcctttattgtgctttgttttcttcaacagtggcccaatcccagcccccagaatcttgtctccaaagcttaaaatctcatcaaataataggacatctcctttcctctttctgcagtcccagcccatagcctctgaaggataccaaataggaaaaagtgtccccagtgcaaaggataaaggagtttctatcactcctcctctgtgtcaccccccacacttcctgcccccatccctcagcaatgagctaccacagaggcagagagtcatcctggccttttctactcatcccctgcaatgtcttgtttctgccctggattaaaataccaattgcccttgggaaaaggatcctgatgtcttacattgccctttttttcctgtcctcctcttgcttagaatcatgggttcagagcacttgctgagatttttaaattgtattttcaaaaacattgcagatgaccaggcccagagataaatttcacaccaaggtcacagggtgagcactgcagccaaggctcctgactcaagcttcagctcttcttccactgccctttactgccttaccacatctgcctccatctcttccaaattttctctctggtgcaggtccaatctcctggagtttccagatccccaatcaggaattctctcagtctgttgttacactcagaggtcttggcctcaagtggtgtcccaaactctacaaaacagggtaggaacattctcataaccctgagctatcaggcagagcttcctccaaaatttggatgtacagattgtacccaaacccaaaatgtttcacaatctgaaactttttgagcaccaatatgaccctcaaaggaaatgcctattagagcatttcagatttcagattttcagatttgggatgctcaactggtaaacataatgcaaatattacaaaatctaaaaatatctgaaatggaaaacacctctggtctcaagtattttggataagggatactcaacctatactgcttacatctctttggatttttcatattatagaaacccagctataagtggttttggcaacaattgagatttattggcttaaacaatctaagcaaatgttgagcagtcaagccataggaaaagcagagacgtagctggaattcaggaacaactcaatcccagtgtgcaaacattaccaaagctctctctttctcagcctcctgtccctgattctttctgtacattgattccactttctcttgttgaaaaacacttcctccctccccataccagaaacatacacatgcgatttgtactctctggacttccactatggaaaaggaactgacaattgttgtctgtatcctcgattcaaaaataccaaggaagatctctgattggcatagcttgggccaagtgctcaatcaattgtgggtgtggagtggcatggaggaatgtgatttccatgctggaaccacacagttcagttgggaagaaccagttgcaaagcagacacagtaagccatctttccttattttctccaaaaggttgggctgaatagcaaaccacaggtaaaatctctgctgctttggaagaataaactactcacctctgagaacattaaggagacttcacagaagtgaggaaggatgtttctttcacctttctgtgctcacactagcctggttctgcaggatattccctccacgttacaattcattcgccaaatatagattgtgcctccaccatagactaggcacagttctaagcaatggtaataagcagagaacaaagtagatgaagtcctgttctcatagagcttaccttctagtagagaaagacaatgctatgagttaaagaatgcaggatagagacatagagtgatataccccaaggaggtaaaatgatgatttagaaagagctatgagagaatgcatctctgagaggcagcatttaagcagagaccaaatcatctgtgggctcaatgatttttatgcccctttcccgcaataacatcagcagaactccagcacttgatccctttatttttcaacaataaaaataaacttaaccttgatctgaatcatatagatctgctttcccatcattttctcatttgtctccccaatttcatgaccaggcacacttacagctcaaggatacagtgagagaaaagaacttcataaaatccaaacagtccacagtggctgaaaataagggataactggtcctctggttcacgtctttcctcctctggctcattttgcctcctatcatgaccatattatgtgcacagatatatggatgagctggggcacctatggcctgtgtgggctaaagggctcaaagattagagccaaaccaaagattctgtcacaggatattaaactgggtggtgaattcccattaagcctaagattccttccagacctgcttaggccacatcccatgtaagctttatgaaaatatatgcaacccagagggaaaagatatgaatgtgattccttgacccagccaaccgtaacatttatccttgtcacaaattttcttggacacagtgaaggaagggaaagggagaatctccttcctctgcatttactaaccaaaacccatcgttccatcaatcacaaaaaaggcccagtgtaaagctgagttgtctctggtccattgagaaggtaagcattaagggatggcatctaattggataatgggatgcaggaaggcatacagacccgagaactagaccctcttctgcttctctctcaaggtggaagaactgggccaaatatgctgttaggctgcaagattgtgcctctggaccagcaaatttagtttcaagatcacgttctccctcgacttgttctattcccttcttgtcctagtatctcaggcgtctggttttccttcctttttatttctttaagcttgttttcaactttgtttgcctgcgtgtagctttttgtgtattattgaattggaaattagtcctccaccttagggcttgagactcatatgggtggctcttttatgtgctttttcctcccaactctattaacaattttggcccaatggatcacagttggcttctcagtgaagcaggcgaagttcccttaatcatttctgaagttctccttttggatatgacaggctggtaacttaaaagaaccatgtcctacatagatagacttaagttttttcaggtcacttaccaagcaattgcgttgatttattctgcgtctgtttaatgatccttgtttcttttttctcaaattgtttccccactattatttaatttttttttttgaacttcatcacagttctggaaaggaagatgatacagaaaccacagccattttgcagatatgaaaactgggacatagaaatttgactgccctggaaaagatcacctacttatttgatgacagagccagttcagggatgaaggttagccagatgtccagttccccaatcttgttcttaatccataaatggaacactagtgctctataggcttaatactacccacaaatttattttatttggctagtactggatttacaaaatcgttaatctgaaatgccttaaggcagggtacttcctctccaatttgccgcaaagcctaccattacttatgcccaaggcataattttcattattctcccagccctataggcatttgagattgcttccattgcttacaaaagttgtgcaatttgtcatggttttatgatctgccagaatcagaaatggctagaagtttcttgggttattttaccacaactctttcctatgaatgtcttcttgagttatgtcagtatttggggaaacacgattagacatataaattgcactaaatagactatggcttttgatctgagttgaattcaagcagtctcagatttttgttcttcccatggatcccactggcagtatggtgaagatatactgaagccactttcagagtgatactttttaatgtgtaaaataaaataacataaaataaaataaaataaatagggattagctgggcatggtgatgtgcacctgtatcccagctatttgagaggccaaggcagaaggatcacttgagcccaagaattcaagggttcagcggccttgaactggaccatgccactgcattccagcctgggcaacatagtgagaccctgtctctgcagaaataaagtaaattagttgggcatggtggcatgcaccagcagtcccagccactcaggggactaatgtaggagaattgcttgagcccacgagtttgaggttgcggtgagctacgatcatgtcactgcactccagcctgggcaacagagcaagacctcatctctaaaacataaaaattaaaaaataaaaataaatacatggggactatataggaaaccaattttattgaagtacaactattaaaatatttttagaaaaaccacatttgtggtataatatgtgttttttaattaaagcattaaataacaatatttagtggtaagtctaatagctaccataatttcaaagtggtaatgagaatatctgctattttgagatatctgcaacaactgtaaaatgatatgaagacgtcagtgtcgagctctcctgaatccctgtgggtggtgggatggaagaaaactagtcaagtagagggaggagtggatccacatgtcatccaggtccagtgaaactggctggccctgaagcagttatttttcttgtataacaaaccaccccaaaactcagtggtttaaaacagcaaccatttcttattgtgtatgtgtctatgggctaatgagttagttcttcagtcaattggtagattggctggagcctgcttggtgtgttcactcccatgtctagtggttattgctggctcttggctagggcatcaggggctggaccacatgtctctcatccaacaggctagccctagtgttggcatacagacatggtgggagttacagagtttctcaaaacagcaagagagaacaagccccaatgtgcaagtaccttccaagtctttgttgaggctacatttgctattatctcattaaccaaagtaagtcacatggccaagcacagagtcagtgtggaagggggattatggattttgggaggggaattatgccaactatatttacaaaaaatcaaccatagttcccaccaatcttgggagcataggtcagagagagccccacctctgccatagatagatggcctctgcccatccatcctgtggctacacatcttccactaagttccacaaaccaggaaacttagacctggcttattagtaccctgtccccatagaccttggagccctcaagtttaactttggatatccttggttcaagagggcacctgaatatctagttgcatctctccaaggtaactaaggaatcatagacccaggtatctgatcaattcagcagggaagtcaaaggggaaattttctcctttgaacattgaggataagtaaacttttctggattcaaactggcagggtggagcaggaggggatcagcatcttattgttttatggtaatgttgctttatctgtaatttcacttgagcctgtcttggtaaagacgattgcattttaagttttttccctgtctctccagaagtgccctctgtttaagcaaattctaccttctcatctaattacaagagctacccataatgttaaaaacaattctctgccagtcctctgcccaatgagcactttggtaatgggaacacaagggaggaggcaatggaaaaaaactctgaaggcctttcagctgtgttgccgcgtcatggaaaacaagccaagcaactgcgtggaagcctcgcagcaggtcccaccagagccttcttagcgattccagggattagcagggcacggctgactcacccagctgcctagccaggcacttccatagggcattctgatacctggctgtacatttgctcgactcacttcagatatcaaatagaagacccctaaagatgaggccctgggcagaactgtctgtgtcagttcctgcaccagcttcagtttactgagcctccaaaggaaaatacataaataaataaataaataaataaataaataaataaaggcttctaaattctttggttggaatgctgtcctaggttgagccctcccaaaagcagatccttagtgaaggacgagggtgcacatattttatttgggtggtgatcctaggaagcgctgatgggggagtggagaatctagacagggattcaaagaaagtcagtacagggggcactcatgagcagtttgccagctgctggggctcagcccagccagggacctctctcagagagagtgtacaacatgcctggattgcctaacctgaaaggcaaggaagctggagtattatgcaccaactcccatccttcagtggctaagggctgttcccagagtgtaaacttgcacccagccctgcaggagacaaattctacacctcagattggagaaaatcctaaggcaatgagtcttgcctcactcacagtagaggcactagcagaagaggccttcagaatacacagaaaaggcgagtgccaagggtatatggtgggcaccaactggctgctagaattttgccaactgttatcaccagacaccccaagtatcacaatggctgtctccagctttggcacattgatagctcggaccttcatttattcactgggtccctagtgggtaccattcattcaatatctgtgtgccaggtactgagataaagttttttcatacatcatcacatccagttctcaggacaacatgcagggtattattagcttcattttatagctgagaaaaccgaggtacaatgaggttaagtaaattatcttaagtccctcagcttaaaaataacaaagctgagattcccatccagagccactttaaagcccaagctctatccacagcaagcttcaccccaattaggtgaggagtattttctcctgctgagaaaaggcccagccatgtccagcccccataccaccatttctcctgaatccttctcttcctttctggtctttcctgttcctttatctcttgttttcaggttggctccatggaattaactgatgtcccttcagtgttctagatcctttcttgggtaagtgggctatccctcttatcctccagacctccttaccctaggggctgggatcactgtctgcatactcaagacatctttgaatctccaagtccttaaacactctccaactcatacccacccacccatgatctggtctcgttccacccacacatggcaggtgctttggtggattctactgattctggcattctagtggggaaggaatcatggaaccatttctttgtagcatcttgcaggtttaggactgatcttactggtgggtcccaagcaaattgaactgcttgatttgtacataagcatcaggccacagtgtaagccctgatttactgtggttaatattttaaaactaagatagcatgcagcaaggactaagagagggaataattaattctagcctggcagcgagggagtgggagggaggtggcagctcctgcagtctcaggggggctccacagtaataaacaaaactgtagcttccaggtggcaaaaaatataaggggaatggatgggtgcagaaggatgctgtgcaactctattttagagtcaacatatccaacttcatgaggatcatactattatttcaaaaagaatatcaataggttgggcgtggtggctcatgcctgtaatcccagcactttgagaggccgaggcaggtggatcacatgaggtcaggagttcaagaccagcctggccagcatagtgaaactccgtctctactaaaaataaaaaattaggcatggtggcaggcatctgtaatctcagctactcaggaggctgaggcaggagaatcacttgaacctgggaggcagaggttgcggtgagccgagatcatagcactgcactccagcctgggcgacagagcaagactccgtttcaaataataataataataataataatatcaataaagcatcaatgctggcaccatctctggtggggactcagaagccactatcagtgagtagcagattctctccatccaacacaggccaaaaacaaaaaataaagttagaccacaacataatgtgacagaggttgttgatggaaaatgccctggtatagattagggagcattaattttatacactggttccaaatggagcatttaaatgacaaaatctaaagtgttttatagagaaggaagagtagggggcctcgagtcattcaaacctcattttaaatcccatcttagattccaactccaggttcttttgaaccactgagtgtgccgtgccacctctgtggctgtagacaatagtcgaatttcatgcacacatatatgaaattcacataggtgatatttcaggtaatgtaagtgctctgaagacaaataaagtaggaggaacagagagaacgaaggagatactatatttggacagagtgggcattcatctaagaattttggctttggaacacaattgaattctttcttggcccaagcctgtagatctttttaaactacaaagtagacttcatttggtggctgcaggcaggtgtacaagcaggggagaattatttcaaaaagtcattacaaatttcacatgctcccatgcactaactgagcgctctatgcatatgaagtcatttgctattcactctgccaaatgcagtaggtaatctcaacatttccacttacaaatggggaaactgaggttctaagaagttacaaggaatatgcccagaatatggaatatgaccatgctagtcagtggggtggccatccctggaacctgcatgaccttggggcaacgcttctgtgctactccacaatgtcccatgagccctccctaagtagaggagcagaggaggacaagacagggtagaagccccctgactttggggaggcagcagcaagaacctacaggggcctttctggaacccgggtgtattcattagctattgctctgtaacaatattactgcaaccccagtgacttaaagcaacacacatttcttatctcgcagtttttgggaatcacgagtctgggcccagcatggcagggctctctccttagggtctcccaaggctgctgtgcaggggtcagctagggcacattttcatctgcagctttctccacttccaagctcattcaggttgtttgtagagttcacttccttgcatcaccctgagggccctgtttcctggctggctgtcatccaggaatcatgctcagtcccttaccacgtgaccctcttggggcaactcacaacatgacagctgacttcaagcccagcagaagaatctctctcttcaggaagggccggtccttcttttaagggccttcatctgattaaatcaggcccaacccaggcaatctccttttttacttatctcaaaatcaagtgattgggagccttaattatacacgcaggatccatttacgtttccctaatatcatagctaatcacagaatggcatcctgtcatgctcacaggtgccccccatgctcaagagaaggagatgataaagaacttgggcaccagggcacagaaatgctgggggtcatctcagcatggcaccctgcatgccaggaaagcgtgatcctgcttccttctgccattctccatgcctccctccaaggctgcaagtgttcctgccctacagagagccttggtccacatcacacagccagaggccttccaaacgaacatttcttagccgccaggcctcgttctgaactgggtaattgtgatgtttgcagacccatccacctgcctgagttggggcctacatgcattgttctgatcatgattgcctcaatctacaatcatccctccagaggaggctaggctcgcagagccctggaagagcaggcagggggctctggagcattcagtctttcagtgtttgccattagcgacctggggagtgatgcgaatggcttcaattgctccgtggagccagcaatcacagcaggctttgggggtccctgacatgagctggagaaaagcctctgtgaagcagctgccagggtaatggaaatgccctgctgccttgctgcgcttccatggagctgggcaagagtctagggctgcgtgccctgctcaagagaggcccagtgtgaactgcagggccgacatgggctttcctgatgaagctgttcttgcgccgaagagaactgcagaggccttggctgggaaggcaggaatcagtatgggagggcagggtgggtgcagtgggggaagtgagggcagcatctgtgttctgtgattcacaggcaacctagcagtgtctcctgagcctcagagtgcatggggtggctccgtaccccagctgctcatcaccctcatcatcttcatcatgcacagttgcagcccccgggtccatcaatatcccctcctccctctttctgccactccccatgtatttactgagcatctattacatgcctagtgctgctctgggcactgagtaaacaggggtgaacatgccaggcaatatttcctctcggggtgattaaattttaatgggaaggggcagacatcagtcagacagatggacaagaaaaatatcagatggggatggtggctaagtaagagattgaaatagggtgaggtggtcgagagagacgggtcagggaaggtctctccaaggaggagatgtttatgctgaggcctgatgacaagaacggccaatcatgagatggtgtgatcaggtgttgcagacagttcatgccaagcctgaggcaggggcaaggtgggtgctttcaagacacagcaataggctgatgctgttggagagaagcgcagaggaaagtgaagtgttaggagggagccaggttagccagggcctgccagcctgcagaggagactggcttttgttcaaagagccctggggagcccttggaattgtaacacggagattgataccatctgatttatctttctacaagatactctggattggagtgtagcaaggaggtggctgcagctccagagtatgactatgggtgaagcaacctaacccagggaggcagcattccttactaggggatccctactggacagtaatggccagcgggtgcgcaccatgggagctgctggagaaccctaactgctgtctccacagtctccgcctggagcagaagagaagctgattctaagtctgttcctaaatgcagcagaatgtatacgcaagtgaggaaggattctcaagtgaaacctatgtaagaaagtgagggggaaagaatggggcgggagaaagaagcaagcaaggatgtggttgcagctggagactagcatcagctgatcccagaggagccctggagtgtggattgcatcacagttactgctgccttgacactcggagtgccaggctttggtagccctgaactggtcagtcattccagcacagagtggaggtgttagaaactcccagtaggggagggggttcctgtgtctcaagggcaaggctcaggagaagtcacagttataaactctaagccatgtgaagcctggcatctggggaacaggtgcacttgctagtggaaagtaacaggaatctgggcagagcacctccagcatctgttatagtggccacgactttactgagagaggagagggaggatgcctagactaagaaagtgtcctgctgcaagaaagcacaggacccacatttctaaaagcaaatgagctaacaggaggcctgttacaggaggaacctctcattgcctacagatgctctccaaatagtcagctcccagtatgcacttaaaatagggatcaatttatgggcattccattcatccagcttcccaggaataagttcattgcattctggaaggttatatctaaatatccatttagccagcataaaaggagattaggattaggtgcacttaatcagtacattagaatcttctaccaaaggtatctgatcctgtttctgagaataaatgcagaataaacatggcctattagcaaggagtggctcttcctgtcccctgctctgtgattgcagagaagaaaccagtagctaagaagtagggccgcctaacagctgcttctgtgatggccacagctttgcttaggggcactggctttaccgttcagctgtgtagctctttagaatgtagatcagtggtttccagaccttgcctgcacatcagaatgccctgggatcttctaaaaatccagaagcccaggtcgtatcctgaaccaactgaattacaatctctgggaatactttttaaataaactttttattttgaaatatttttagagttacagaaaagttgcaagggtggtatacctctcacccaatttcccccattgttgaaacctaacattatcatgatacatcaattacaaccaagaaaccaacatgagtacattactattaatcgacctccagacttcacttggattccatcagcttttcaattagtgtttcttttttgttccaggaccaatctggggcaccacattgcatttaattgtcatgtctcccctgttttctttagtttgtgacagttcctcagtctttctttgttgttcatggccttgagagtcttcaggagcattgacagggatcctgtggaatgtcatccaatctgggtttgtctattgttcttgtaatggaacaagactagggttgttagactcgggttatgggtttttggaaagagtgaagctaaggtaaagtggcctactcatcatttcatgtcaggggatacagtagatccatatgacattactggtaatattacgctccgttatttggtgaaggtcatatttgccaggtctctccaatgtaaagttagtatttttccctttccctattctaatctttgactgagtctagctcactgtcaaagtatggcgtgtgtagaggtgggtggaaatcagtcagaaatctatgagacacatttttatggccaccaaactatcttcatctctttgccttagttcccaatcactgtttgcaaactttctcaaatgatctaggactttgcagacccctcagttccctgggattgagacagcacttcctgactgttaccttgggtaagttatttagttttgtctcagcctcaatttcctcctctgagaaatgggtattggtcaaatatctgtttctaggagttattgccatgactaagttagataatgcctataaggttttgactatggtgcaaacattcaacaaatgttcactatcaatcatgttaatagtcgtggtaataattgccttcattactctgaccttgtgtatctgatctctagggccacaataatgcacctcagtgacataaaccagtaagttagaacttacatttgggaaagagagacatattataaaactaaatccaccaggtttatttattataaagaaacacttagcacttactatatgcccagcactgttcaaatcatttttataaatattaacccattccatcttcataaaaagaattcaaggtaggaactattatcactgttttacccattaggaaactgaggcacagtgaggtgaggcagcttacctaaaggcacacagccagtgagtggcagagccaagatttgaatgtaggcagttcgacttcagagtctacacttgtaaccactacatgatgctatgtgggataaacaagaagtataaactgtgtgagactgtgtgaaaggtgactgggtctcatcaggagcaggaacccagtgagacataacatctgctaaatcttttttgtttctttctttctttctctctttttttttttttttgagatggagtcttgctctgtcacccaggctggagtacaatggcatggtcttggttccctgcaacctccacctcccaggttcaagcgattctcctgcctcagcctcatgagtagctgggattacaggcacgcgccaccaagcccaggtaatttttgtatttttagtagagacggggtttcaccgtcttggtcaggcttgtctcgaactcctgacctcaggtgatccacccacctcggcctcccaaagtgctgagattacaggcatgagccactgtggctggccatcatctattaaatcttaagcaagcatatgccagacaggagagaggggccagggttaggaaaagagagctgaggtgtttggaaagattgctaaggaacctcccagtctagtgtggcatcctctacaaaagccagctggtattaagcattctcccccaaagccaactaatattaaattttctttcagagaaatatctcattctctctctcactgtctatatcctgctctctcaatttctgaatgtgcccttgggaattcagacggtctttggttttagggaggttggagctggcagggtgtctctttcaataactggaactgatcgccggtataaaagaacctggaccactcaaagcacatcctcatgctgtgtcttccacagtcaacatcaatccaccctccttcgcttttaggtcaggagtttcgtaaggcaaaggaagtttctgattgggagaacttagattagccatcaaattatatttggggtaagtgaatgttcatttcaaactggggggtctaaaaaaagttttgtttctggggcagtgtgggtttcaaagtatcgcatttacagtttcaccccgggcgtgtgcccagatccaaagtcttgcatcagaattcaactacaaacttctgggcgacagaaatgctatcttcatcttatacacacacacacacacacatactgacaattcccacacaataagtgctcaacatgtgtcttaaatgaatctacaattagacttatgataaggtgccataacttgcttatttgtcactgcatctgtatttgaaatcccaagaacacatgtaaatcataagctttgtcctttcctttgtcccatcttgtcaccatataaaattatctttctacctccaaaattggcagggaggaaaagcatcttaattcacttcatgactgaaattttaaacatacctttaccgaagtctgagacttcaaagctgtgtgcccttcagcccaggtaactagtgagtgtcctcaagcattgacattatttaatggaattcattttatgcctgaatatgttgactccacttctgtctaaagtctgctgggaaaacttggaattccagtggcttcacggagagcatattgattctaagctgagtctgagctatttctgagccattatgtttcaaagacagggtctcacactgaattttcctggtttagagtaaaagagaagatggtgtgggtgtatgcgtgtgtgtgtgcacgtgcgtgcattcgtgtgcgagcgcatcctgcacacatctgtgcatgtatgtgaggtgaggggagaaggtggagagagagataaaagggggttggcctatttattgagagggaggggaattgcacttacaaggttctccttatcaatgaagacagaatgattggccgagcccaggaaattttgacgtttatctaaaacgtcttatggagaagaaagaaaagaggcaaaccaccctgacagtggcaggggaatgagtcctatggctacccaccatccccaggggctcatcagtaccccagccctcagccacaatgcacacacagcctcagtgaaaactacatgcttgctaaaaaactcactttgcagacaagtctcctaaacttcccaccaaattgccaccttttaatttcacagcccccttgaaatccagaaagaatagatgtgcccttcaagtggagagagaaggacagaagaggagaataaatatcactaatattcattctaaagatgtgttcaccagccgctgggtacaatattcctgttagggctcacatcgttgggcacaatatttgttgagcatttattgtgtccaggcactgtcctgcatgtagttgcaatttagcataaaggttaacagcctgagacctaggggaaagttatttaactttcctgtttctccattcttcatgtgtagaaaaggggtgatgatcataacattgttatgagcactgacacacataaagaagttagacactgcttgacatgatgtgagtgattcacagatgtcaactatggtgtttctaagcatgaagatggcctcatgcgtccagttaagatccatgtgacccaaaagttagaaaagaactggcaatttctcgatggcaaatgcaaacatcttttttacttcttaaaggatttgggaagctgcagagagcaccctagttcttcccagaaggctgcccctgagctcttatactgatgaccaacaacagagtggtcaagtggtgccaccaacaaccacttgttctgatcagtgatgacatttagggccggccctgtagcaaacttttttctggctcctgaaatgaaatgagatgacgagattttatttcaccagtgacattcttcctgtcctagcccacaacttcagtattcccttttagaccaacacaggcattaaactggaaatacatttcagctttgatagaggaaaaggctaagaatagaatcattggttgttcctgagatgccatgtgaaaaatttagattaagtcaggcttccttttttcctcttggcctattttcttttggtaaaggatgtgaagagagcaccttccatgactgatgcgccttccaagcatgctgcatttctgctctacttgctgcctgctgcttactcatcctgatagtccaactgtctctaaaactcctaacatgaaagaagagaaaagaaatttgactgcagggtatggagggcagagctcggagagaggatgatggcacgaaagcaaacttttgagacatactcagtaggtcagttagcttttgctttgtaacaaatgaccctcaacttaaaacttagaggcttcaaacaacattcatttatttagctcatgattccataagtcagcagtttgggctgagttcagctggactccctttgtagtctgttgctggatcagctggagggctcgttggtttagagtgccttagctaagatgatttctctctgttccacagggtgtatctcatgatccattagactagcctgggtttgttcacctaatggttgcatggatacaaagacggatggagaacactccaatctaatcatgttgagcccatgcttatgagataatgaaacctaaaaagttgttctccccagctgaattgcatgggaattatcaaacacacatgtgtgcacagaagccaacaaaaagtatacttggctttaaggataagggtacagggtgcagggagacccgggagacccataaaatagtttatagccaaccccaacacctcatgtaattttgctgttaacattttccctccttcaatgcaaattattttatagtgtttttttctgattataaaagtaattcgtgttaattgcagaaaaataggccaagaggaatataacaaggaaaatataattaaccataatctcatgtgcagaggcaataattatgaataattattttattatacatacggcataacatgaccttgtttctatctatatttaaatatccagtaataccatttgttatgtgctatatgtcagaatgtctgctaactgctttatatgtattaattcatttaatccccacaacaacgatcatttttgagatgaggaaaatggggcacagagaggctagacatcttgcctgggatcacacagcaagtaagtagtagagccagcattcaaagtagtgcagccccactcctcagagcatttttgacccttaaaatctgtactattgatccacatccaatgttactcaaacattagtgtgcactagaatcccctgaaaggcttgttaaagcaatttgctgagcatcatttccagatattatgattcatttggtctggggcctaagaatttgcatttctaacagactcccaggtgaggctgatattacaggttcatcaaccactctgcgaataactctggtcacagcagtgtcaaggtatgtactgttaattccgcttcacagatgaaaaaacagaagttcagaaagattcgataaataggccatggacacacagcttgtcaagtctatgttatatccattttccagtttactctcatggaaaacaataacagccaacgtttacttcatttgatagctcgtgcctttcttctggtgaggctatagtgctaaggagatagttcagaagttagatgcagcctctctgagagccaggttttactgggaggtatgtggattgcagccacgcatttgtttgctcattcattcaatcccttggcaaggagccctagctgggaagccccatcggtgatggttggtggtaggattcctgcccccagcagcttccacatgctgatactgaagtgactgtttctgactgaaggaatgacaatctcatcaagtgaagtatgaacagaaaaaaaaaatggcacaaagatgttaccttttgaagctattgacgggaacctgttccaaagacctctgtgctattttctaacagcaaagagactggtattattttggcgggttccttacaagaaaaaaaataaccctcctgtgatggcagagcctctgtgatgtctgcctagatggagtgtagcttttgcagccatgtaggaccagcttggagctctctgggtgtccatccttcctgctcagtgtgggccacagacaatagcatcactgtgcaacttgatagaaatgctgattctaaaccccaccacaggctgactggactagaatctctagatttggagcccaggaatctgtgttttaataagttctccaggtgatttttagaagccctagtctaacaagaaccctgcaaagctaattattttgcttcccaaggagaacagctaaccctctggaaagttaaaaccctttaggtctagtgttagacctaaaggtctactcttctcaaactttagtgaccatcaggatcacctggagagcttattaaaacataaattcctgggccacaccctcagagattccaattcagcggatctagggtggagctcatgaatatgcatttctagtaagttcctgcatatgctgctgctgcctgtcctggaccacattcctagactcctttagcaacatccttcttaaagaaaaaaaactgattgcaactgtcagaccttttcaagatctctgtttccgtcattccctttcaaaattatattttcttatttagggaactcagtttcttcagaaaactacttactttttaaacttatttttcaatcaaagtccacaaactatgttaaaatagaactggttctggtcgtccagggcatttctgaaagagcttgttgagtgtaagtaaatggaagaggtatggtatggcttcatgatttcctgttcaggagactttaatcaccttccatctgcttagaaccagagctctcatgatacacattgtgggggactaaattttctgagcacattagtcaagccctgcaaaaatgacacccaaatgatcacaagtggtctccaagtcccctgaggaagaaaccttaaagtatttatctctagtctcaaaaaccctcagtatcttaacccacagtctctaggatgctaacgcttaatgggcaaagtatgtaaagaattttttaaattactcattggactctcctgtaagtattaacatgctcaaattaatttgatatatattgccttaaatagtccaaggaagattggtgccaaaaagcttcatgaaacaattaaaaaacacacacagtcatgtgctatgcattttgatcaatgatggatagatgggtggtcccataagataagaataccagattattactgtaccttttccaagttgagatatctttagatacgcaaatacttactattgtgttatagttacccatagtattcagtacagtaacatgctaaacagatttgtagcctgggagcaataggctataccatatagcctaggtgtatagtaggctatcccatctaggtttgcctaagtacacactatgatgtttacacaacgatgaaatcacctaatgacgcatttcctagaaggtatccccatcgttaagtgacgcatgactgtatactccaatttaagatcccagcaccatgtcaaacaaaaaatgttataaagatgtgtgagacatgatccttgccctcacaattatttacttgctgctttctgcatggtaggcactcagactaaaaggatgctggtggagtgacctgtcaaacacgaatgtacacagtatttttgtctccaggagaatttgtgcttcaaggagaatttgaggacctatcacagtttcctgggggatagagatgacatagaggccaaagtagcatgaagcaagaaatactgggaaggatacctgagaaccacacaggagtccaaaggcagccttggtccaagctgccagcctactccaggagatgccatttgttcagaattttgaaggctggatggaaggctggaaaagggttgagggatgatattatggcaaaagaaatagcagacattggaaggattacagtaaaagtaagtagggaagcattttcatcaggcatgctcctgaaggagcaatgattaataagcatgagatctgatcccttggaaaatgttaaacaaacctgtcctacctccaaaaaggaacacataaatctatttgaatggagccatgtttgcccttgtgattaaagcaggctaacctttcctgggtggcttttgtctttcctttttgttattcatgagatcttctgttttcatcgtatatcccctcaaggttctaggtaaatgaactacaggcccagaaaagcttgtttgcctatcatatgttcctcctagaaagtgaatttatggaaattttggatatttgtgcagctacagaaaaggaaatctcaaatctggggagatggaaagaacaggaacctagagagacttgaggcacaaattctctgtacatttgtgtttgacaggtcactccagcagcacatgccaaaccaggatgagcaaagttcataagcttgctttcttatatggctgccacgaccttctagaaccatctggaactctaccaccctccagttaacaggccctatgtgccctggtttgctcttggaaacattctgtacatctgcacatacggagacacccacgtgcaaactcagtagaggcaatgcataatttccagagttagcacatgaatatcacatgaatgtatagtgactatatgtcagagatttacttacttcattagtgagaaaaccagtaggcagatcaagtcagttcacagagtatttgaggaacaaagatttatatggtcagtcaggaaagggaggttaaaaaaatttgtttaattgggttcaaaactgattaatgccctccaggccatacaactacaatgcttgggattatcttttctaccacagatatatcatttgcttctttactagatgaaagtcatgtgctcaatcttgtataaagtaacatgtaacttgtcagtctggtctctaatcaagggtaaataacaaaaacttttgacggtgattgacatgtttattacttttattgtagtgatggtttcatggcaatatacatatgttaaaatttaacagattttgaaataaatgtgtgcattcgttgtatgttctttatacttcaataaagctgttagaaaaaaatagtaagcccaaacaagttacattcccctaaaaaattacataatccccaggcagtcctattagaaaatgttccaatatgatataaaagaattttctcatcttttttttttttttttagctttcaagctttagataatttttcttgactttaattaaagtagttgttctcgactcaaagagatttaagttttggccacttagtaagtgtgtaaccttaggcaaaatatttaaacctccctgaggctcagattctccatctgaaaaaaaaaagggagataataatagatctctgtttcataggtgtattactagggttaaataaaaatatgcatttgggtgcttagcacagcacctggtacatcttaaggacctagtaaaggttacctgttcttaattatcatttccaaggagcaatgtagctcaggagctatgtgaatgagagacgatgagacaaaaaatatcatagaccagggatgagaccctaaggacactcagaactgtgttcttgaccaggtcacttgtctttaccttttttctgattcctcagctacaaaccgcaaggagtagatgagagctaaagcaggtcctaatttttagactaggattcaccaggccttggactgaatcctgatggaatcctggcttcttcacatccagaatctcataagctcttagggctctctgtccacggtattgtatctcagtgatgaggactctggattcgaatcctgattctgccacttactagctatgtgactctaggctacttaccgaacccctctgtgttttggtttcctatctataaaatggggatgatgaaggcacccacatcacatagagctggtgggactatgatactgagttatcacataccaggatctatacagtgctgggaggactctacatgctcagggatcatccctgttactatgagcacctgtgaatgagtggtcgggcagccaagggtcccattcagcaagcctgaggagtgctggtggacttctcaaaatgatgagacttgaaaatgtaatttttatatgcaggacaattcccctttgcggtgtcacccagcaataactccaaaggtgtatttgggggtactaatacaagctgtctggcagttgtagatgtggtttagtgacatttgtacattttgtgatctacatgtcacacacaccctgggactggaaaaaaggtgttaacacccacaaaggggctgaccaggcagttctcagggtggcctagccagaccttccaccctgctgactggcagggttccctacgcaggatgtgccctcctcctcccacagagcccacagatggcttaccacctgctttggggaagacggctgcttcctagttctggggcattgctcagcctgagctacaagatttatccccggagggttcctttagcaggcactgtgggtctcctatgagatccctttgttcccttttaccagcccattgcatagcttctgcatgttttgctgctaaaggcaatctatgattttactcatacagaaagttgcttcatccatacagagaccagaaatggctgggagtttttgtacctcacaagtggctttagccaatgactgactgacatagaagtgcgcaaagcccagctctctctcctggaggtgaggcatgctctgaggtgcatttaagactccagagctccatggaggatgatgctgatgctggcacaccccccttgcttggcttcttcccctttcttgacctatctcctccactcccttcctgatctccccccagagcattccctcaacaaattccctttacatagactcttagctcagggttggctcttagaagcagcaaacccaggaggagctccttttcccgcgcactcccacctccagtagagaagtgcctctctgcaagtagcttatggaatcccaaaggaggacggtcctgctctgaagttcttagaaacacagaactttgagcagtttgccctatcctgagctacctgctttgtaaacactttgggagcaggaggagaaaccagatgggaagacacaggccttgcggtaaatggagaaaacagcaattcaaatcctccaaggaaaaaacagttcccccagggcaaagtgctggagacgcatacctgcctcgggtctggaaaattattttttaatgcactgggcagtctcggagcctcatgaacttcttccaaaacagatatagcctgcctgtgtctcattggcctcagggaaaatctctctagcttccctcttcagctcagcctctatagaaaagggtctgtgccttccgactgtttcttcatctgaagtaaaaagattgatgggacacaatgggactcctgagcccagccatttgtggctaaggtacttgaaatgatatagagggatcccttctccccaagccatcagggcagcccatagcctagactttgggtaagaaaaatatctgaaaatttgtcttttggagtttgccaaatcccagggtccaagtgggcccacggataagaataacggttgtgacagccaacctgccaagtttccaaaagactggatggtactacacagactcactggtgtagcaaagcacttcaaactttgattgcttaaacggccatcaaacgatgcttgctcctctggccacaagtgacactcttaagtgttgtccaccctcttgtatgtttccttccaatgggcaaataactctttgagctatacagagactaggtgggagagggtgaatgggtcagggtaagttcctccaagtttctggaacagtaacacccacacacacacatacacacacaatttatttcctctgccaactcagggttctggggtgggaattcactgtggtctatacactacctggcaattggagatgcaaaatgtagggttttgggcccaagaaagctaataaagagtacaacttgagtactagaattactaatgaagtacaactcattaaaaatattagtaggcaaatctaccttttctgtgatttaacacaggaatcgtgggttagaagatttgtgtcctccatttatagaatatttttctgttttcttggacataattaaacattctagcctcctttccctttgttaatatggctttgataactttgggcttcatttacggattttgtatagggctattaagcgcagaacagtgagactatgataattataagaatagaaataaatgcataataacaaaacttacaaaaatcgattccattacattcagaactggtaataaatcaacattatgtaaaaaaacctttatgcatagataatgcaagggcataaacaatgtttcaaagggagaacatgtgaagtagaacagatggatttaggcagacctgttactggcaaagctacaagctgcttgcagacagattaaagccatcttagagaggatgagctttgggttgtttttcaacacctaagtgttccataaatgagtaagagttaaaatcagagctaggtatctctaagaaataataatagctaagatttaggcaagaatgtacttaaactagtttgttagtagttgaaaccttcatgtgcatctttcaagtctatccgctattacgaaggaccattaattaacctacatattttattttaaacttctttgagtcataaactaatggagaaagaatgaattattcaataaatgatgttgaaaaaggagctgtttggaaaaatatagaattagggctttaattctttccgtatgtacactaaaacaaattttagctggattaaaacgttgaattaaatatgaccactgagaaaactagaaaaaaatgaacttttaactcattttggaatatgcaaacattttacagataaaatactgaggaaatcacaagttaaaaatatacactgatgagcctttgttgaaagcactttggtaatatacctcagctgtcattaatttattttctttgacctgtaaatccactcctgggaatctattataaggaaataatccaagatgtaaatgcaatgtttgtgtaaatatgttcatgatagcctaacttacaatggcaaaaagaaagggaatggaaaggaaaggaaaggctggggaaggaagaggagagaggaaacaaaacaactctaaacatccagtaacaggagattagccaaataaatcttaatatgttatgtgagggaacatcatgcagtcattaaaaatgtcatttgagcaatgtctaatatatgaaaattttcataatgtaattgactataaaaaacaggataatatgtgtatatctgattctttaacaaataaatttatgtatatgcaggcatacacatgtatattgattctaaatagtgcattggttcccaatcttggctgcacactaaagtcactggggagctttaaatatactgcatcctgggattcattctcagattctgattgaattggtctggggtgttaccggggcatcaagattcttttaaagctccccaggagatttaaatgcacccctccagatttgagaactatgggcatatgatttaaaaaaggaaaaaaacaattcttcactgagaagacttggagaaagaataaatatttatttagccttccgaagcaaaaagacattcacctggccacagtggctcatgcctgtaattccaacactttgggaagttgaggcaggtggatcacttgagttcagaaattcgagacaagccgggccaacatggtgaaaccctgtctctactacaaatacaaaaattagccagcatgggccagacgcggtggctcacgcctgtcccagcactttgggaggccgaggcgggcggatcacctgaggttgggagttcgataccagcccaaccaacatggagaaaccccgtctctactaaaaatacaaaattagctgggtgtggtggtgcatgtctgtaatcccagctctcaggaggctgaggcaggagaatcgcttgaacccaggaggcagaggttgcagtgagccgagattgcgccattgcactccagcctggtcaacaagagcgaaactccgtctcaaaaacaaaacaaaacaaaaaaattagccagcatggtggcatgcacctgtagtcccagctactcaggaggctgaggcaggagaattgcatgaacccaggaggcagaggttgcagtgagccaagatcatgccactgcactccaacctgggcaacagagtgagactctgtctcaaaaaaaaaaaaaaaaaaaaaagttcacctgctagctgccagcaaatttcatagaatagtgcccaaggaaaaccttacctgtttgtattactaagaaaaattatccataacttggaaataaagcaaaatgatggatgcacatctttcatttgacatactggtcatctaatggacccactcaaggattatcccattctctttctttgacgtactattaacttttatcagggtccagactctgtgaagttacatgtttgttaatttagagatctcgtgtcatggaaatttaaatgattcctgtgtgatagaaaaagcaactgcaaaggtgacacttttattgctccgtaagatattaaccagctttgtatttcagttagtaatcttattccagtattatgtatgaattctctttgaaccagctttaccatcttgttggctctctcattaatgagttaataaatcttcatcacatactccttctatatttttatgagactcatgtttttaactttttgaaagggtaccttgaaaactatccatgatcaaacatggatttagtgacagaagtgaacctagaaaactcatcctgagtggagactgatccagcaacaacatcttagcgtttggccacaaaatgcttccttctcccaatgttctcagaacatgcgctctgtgtggcttacaaaaatctccaggccctttgcccacaaggtctaatgcaagcgccttttaaatccactccatgataatgatagggaatgccaaattgagtaactggagaagtcaaatttacccactagggtagttacagtcacagtagttacttaccttaagcaattcgatatttgggtaaatccaattttaccaatcagtcttctgccatcattgactcccacaatcacttcagagacactttatcatcatgtggagctcttctgccatcaaatgggactcctgacactttggccagggacctttttctattttttgttacccctctctgtgtcaaatactcccataatgatctataaaattctagaatataagctagtagctttgctatttaaagaaaccctgcagtgaattcacttctagagcaaataattttccggagagtttaactgcttagtaggttggcgtatagtaggcttgttcagagtgggattgtgttcataggtcctggtttcttcaaagagggacatagcagaactgttatctaaggctatatatatacaaagatatatgtatggcagagtatggcagaatatatatatattcagcagaggtgataataatgatgaagtccagggtgaatgcccatgttttttgatatgagattatcagattaatctgaggaataacaattaggttggcatttttgtttctctcacctccatggaagcagaatttgcaagtgagtcagctccttcctgggagtttgctggcttaggaaatgtctttcttgtttccacagtggttcctgtaatactgaggagcagatggtgtttcttccagcatggtaaacttttccaaaaaggatgggaggatagaaagaattaagtccatcagcattctaatctctatgacagtcttgtgggtgcaattagattctgaggaaccattttaaaggaccagctaatcaggactttttttatttttatttttattttttttgagacagagtctcattctcttgcccaggctggcgtgctataatgtgatcatagctcactgcagcctctaactcctgggcttaagccatcctcccacttcagctccccaagtgtctgggactgcaggtgcacactgccatgccagctaacttctaaattttttgtagagatgggtctggccatgttgcccaggctggtctgaaactcatggcctcaagcaatcctcctgccttgacctcccaaaatgctaggattataggcttgagccgctgtgcccagccagaacccattcttatgaagtgacctgggtttgtgtcatcaacactatacatacacctcggcttccttcatagagccagagacctcaggtttggaagagaatttgcacatcacctgatccaacgtcccatcttataaatgaatcatgtccatcaaggctaccagctggttggtcagcctttccctgaaatagggaactcactttttctgagtcctctaacccagactttggacagatctcttagaaatttattctgtcatttcctcccagtgctgatggttttattccttagagtctgttgcaaattttcctctgccaatttggtaattctcagtaattattttaatagatgtagttaaagtaggtgaagttcgtaggtctcctccctcatgacattgaaactaggtattatatttaaggaaaacaagcctcaggatggattcttccctcaccaaaatatttcttagcaagcagacacaatactagttggaaaacttgttctataaacacaatgaagtatgcattttctgttcacttgggcattccaatcagcaccttgcataatattctagtggcaggattcaggtgaccttgcagtcagatcagattaaaacaaacaaacaaaaaaagtggttcttaaagtgcattccctgaaccaccaccagcagcagcatcagagaatgagaatcttagaaatgcaaattgctaggccctaccccagaatcacttactacatcagcaatctgagttttaacaagtgctacccatgagaatcggtcaggaaactcccctaaccatgacagaatcaaggagcaaatgtaagccttaggttaatggcatacttagactcactacacacacacacacacacacacacacacacacacaaacacacacacacacacatctgccttatattatgtgggatggtagtacatttacagtatttctagccaatttttacattttgaacattcattccaccaataaaaaattattgctaacatccattaggttaattagtaaacctttccatagatcacaggcaaaaggagttgaaacactaatagtagctatctcagaaatgtgagctcctgatataactctttcaaatgctaactgcctatcctagaagtctgtatctctgcttagggtaccatgactgtttactaaccacctcttgggtacagattacaactaatatacattcatgtcaatgaattttaagttaaattacaatttaatggctaatattgaaccaatctagtatctattccttgcagtaaccagagtcatgctctgtcttcttttctccaagctaaataccctcataccctcaatcatttttagtacaatgggatttcaaagcccttgaccacattgttctcctcccagctttaaggtaactacaaacgaatgagtatgaacatgtgattcaggaaatcgctttttctgtgggcttccagatcccaggataaaggtacctacacacaccctaaatgttccacttctattccctgagccaccacaccctagaccttgctcaaactcagagcctctctttgccaagcttcccttgcctacgtttgcaccctctacatgggtcagacatatggaaacataggcaagaatgtgggtgtgtgatccatccccttatctatagcaatgaattccccagcatagcacatataccttcagtggctggtgaaatgagcttaggaggatgatagatgaaatttgcaatatacattttagtaattgtgtatctactttaatgtatattaaacaaacataattagccataacatttctgattttatagatattattacttagaatgaggctaggtttgaaaggtgcgttaaaatcaatgattttaaaaagacttagggaattaacaatgtagcgtgcatttatgcctaaattgtgaagaaaacataagaggcccagggttttggaaaaactattcacaaggataatgagttcaggatatggggaccctggccagagttgtcttcaccataagtactttttctaggaaaacagaaattatgttgatcagcattatttacctgccaaactgttcatcttttctccagaaggcagtaaaaaataacacaaagtgccaaaacgcaatgagtttagcaacacaaacaccactgattctttgataaataccatacagctcatgtgcctgcttttaattcaggagagaaagccttctataccaaggccagcacccaccagagaagatctaagtcagaaaaaagtagagttttagttttgctatggaaggatgatatcatgaaatataaaaatagcaattgtctgaaattaacagtaggaaaaagacaggctacattggccttagtcctgttatttttatatattctaaaaacattctcaactagcatagacgagtcccttcctctccactattttgatgtttgccatttcaaggataccttaaggtgagccctagattgggacttaaagattcaggctctgcgtgactctgtagtttcaagttactccacctttctgagcttcccttcctcctgtgacaaatgacacccagtaatcctcaagttctagccattctgtgatattctgaatgtggagtcttcaaatccaagtaagttcagccaagctgagaacacagagaatttttgttctttttcccctcttttcctgattcagtggtttgttgattcctctaagtacatggcgtccagctatccatacgtgataaaaaaaaaatagctcataaacaagtggaagttgtcttcggttggattcctcagaagcagacccttagacagggatttatgtgatagtgatttattaaggcagtgctcgcaggagaaaccagaaagggagtttggagaaggacagtggggacacaaggaagccaagccaaggagcccttgccagcagggtcccaactttggcatgatcctgagagaatctttggagtgtacattacaccttatggtttgtctcaccttaaggcacagaagcagtacaggagctagttttttgtactcctctgccagtcagttgttagctaggggcctgccctgggggtgggcggtggggggagtagtgggtcaaaagctcccaggtacttgctgccactcccagtggatcaggcgaagcaaccctggggtgctctttttttttttttttttttttttttttgagacggagtctcgctctgtcgcccaggctggagtgcagtggcgcagtctcagctcactgcaagctccgcctcccagcttcatgtcattctcctgcctcagccacccgagtagctggaactacaggcgcccgccaccatgcccggctaatttttttgtatttttggtagagacggggtttcactggcttagccaggatggtctcgatctcctgacctcatgatccgcccgcctcggtctcccaaagtgctgggattacaggcgtgagccaccgcaccaggccaaccctggggtattcttacaaagagggtcacaggcacagaaacacggagatgaccacaaagaacccctaagggagctgagcagatacccaataacattgactactgaaggcaaaactgttactaagcctgaatacataccagcttccttccaggtgttggtgtggtcatagcagcacagaaatagtttggttttcatgagaatggtgggagtggggtctttctgtttggtcttagaatctgtctgttcacgcactcctgagaggaatcattttgtttagggtataacaagactttcttttattgtggccaagtgttagccccacagaagattactcatctcccaagaaccaagctgtgtacctcagaatacaaacattttcatcagttctgtcctaggatggggaaggaagagacccaaacgcaaaggtttcttgcgagagctcctaaaaccatccctaaggggcggttctccactccagcttcaggctggatgcggctgcactaacagtagcactctgtaaatattggttaaatgaatgaacctgttaccgtggtttgtttaactatgaacagaatcaatgagacaagattggggcccctcttctctcctggtcagtgaggctgctgtgctttggctcctaagtaaacaatcaggaactgttgcataatacaaaccacagggctaaatacccatttagccacatttgcaaaacagacaaaagaaacattggcattttcgaaaaagagagatttaggcataatcagtgttggttgtggctggatgccctgttacaattaagaaatgccaatgctggctgcatttcaatgccaggcctccccagacccagcaccctaaaatacaaaacccaagcagaggccgcttttcacgatgctgtcactaatcctggactagcccagggaaggggcatatcagggaagccagacttcccttctcagaagaaaccagatcaagactgtgcctatttatatccagacatacagatatagaatcccatttaggaatggtgtggggtggaatgttctgggaaatagattagccaagcttgaaaggaattgggctttaatgctagtgcctcttctcagagacactgtgggagagggtgacaattctgtgggctggttaaagtacttgtcacttgagattgttcttcagccaaattctcctataagaagcatactaatggtgtttaacacatgctatgttatcagatattgaaaacaacatagtgggaaggaaaagggaccaccacctcagatcaagatggcctcctcaatgctggggagccgcgttcttgtgtttttggatagtttggatagtttggatagtttatcataaggttacccttatgggaaaccagagtttcccactggatccttgcaaagaccttcagccctaagtcatgctacacatggatccttccactctgggggaccataagaaggacctgtggttgttgttgaaaatgcagatgctagcccgacctccacagattgctttccataggtaatgtaactgggaatctgcattttagcaagcaactaaaaaagattttgatgcaaggagatctcagaccatgctttttttttttttttttttctgagatggagtctcgctctgttgcccagactggagtgcagtggcgcgatctcggcttactaagaggccctgttatgagccactgtgactcatctgttatccagaaaatgggtgtaaaatagatgcaagatggtatatcaattcattcacaagacatgtgttcatcatatttgaaatataatcttttgatttaagtaggaaatagtttaaaaccagtatttcctgctatgaaaagaggagattgaatttcatgcacaggaatattcaaaaatacaataacaaggagccaagtccatcccatgctttagaaaatttacaactatgaacacggcagatttaagaagtgtccattcttagtgatagaaatgtaaacagaaacttacagcatgttatctgctgaaagtactttttgctctggtccttagtttgccttaaaacataagctttaattatttgcagagggagaagaataatttatcagcaccatccacagagtctccaatgcacaaaatcctcagtctcttcttcctctgtcttacagaacaagacttcacaaaccttgttatttgggagagacagaacatcgtcagtgtgctttttctaataactatcttctcttcattttctgaatacaagaatttatctcatggaaatcagtcattttgtccaccctccagtgcagggcaccattaggagactcagaacccatggccccgtggagctttcagtcagcttgggaggtaaatgatgttgggagtctgtaggacatgtgaattggtgaggttaaaataacatcgcgtggtcaagagtggagcacaggcacagagtcacccccaaggtgggaactccacctctcacacctaccagcctaatatggagataatgtgatttagggcagcacttctcaaacttagtgcttgatatgttgttcagtacgtgatccaatccaataagtctggggtggaactcctaacaagctccctggtgaggccgatgctggtctggggaacacatttggagtaccaaaggtttgggggtttctatataatccccctagtttcatataaagttcttagtttgattcctatcacattgcaagttcttgacaaataactattattatgaagagtgttttgacaactaacagttgtgcggcatagaatgttagaatagatgcagctgattttgcctaacagggaaaggctgcttcaaacctggggcaaattctgatgattcagaaaatggaaggaatcacctcttcaccagtttcactcaccctttcaatgaggggacttagggagttgtctcagcagcagtcactgtgcttaacaatatattcccttagaataagtgctttgcatcttacggttgcattctcttcaagaaatttcatccagtgaaaataatagcaccaaacccatttttgatcatattcccatgccattacagtcagggaaagagattattagtctccaaacaaatccaagtactggctctttctggagggcaagaatagaaacccagagaaaaaaaggtggctattgtgagccaaatgagagcacattaacccatgacttagatgcttagatgcattagtttgatgttgttgctgttgttttggtttgtttgatgaagatgagagacataaggctaagagaaatgaatatttgattggattgagtttgatcaaggttgtgcaatatgaataacatagtagaacagggttatggtagcaacacttatcttcaatattgataaaagcaataatgcactatgaaaaggtagcaatcatggacctataaacatgacaacacagctgcaaaatgtaaagagtgaaaatgggctgaaatagaagaaattgatggaacgaactcactgttgaagacctgaacacatccctttcagaaatcaataggtcaaattgactagggaatttagagagtttgaaaacataaactttccttttctgcttgatttgatgtcaataggtaggtagttagagtcaaagacagaatggactttcttttcagacacaaattaaatattcacagccattggccatgtgttaaggcacaaaggaaatctcaacaaattccaaacagtaaaaatcatatggaccactttcaacatattgaaaataaaattagagatcacaaaaaaacctctaatatttaaatcttaacatcacattttcaaataactcttgcattagagaggaaattaaagctgaaatttaaaactatatagaaataaataacaaagaacatactatatgacaaaacctgtaagatacagccacagtaacacatagagcacaatttatagcaataagtatactatacccagaacaagaaaaatgccaagtaaataagtcatttgtcaattcaagaagatataaaaggaacaacacaataacacatcttaggaagaaaaaagaaataagaataaaggtgagggtgggaggtgtggaagaatcagtgatttaaaatataggtagagatgataaacaataatgaaaactgggatttactgaggtgaacctgtcaaatcactctgtgttgttttccaatatgtaaatgaaactaaaaatagtctccaggttttttgtttgtttgtttctttgtttgtttttttgagacagagtctcgctctgtcaccaggctagagtgcagtggcatgatcttggctcactacaacctccgcctcccaggtacgaggtttctcctgcctcagcctcccgagtgcctgggactacaggcacacgccaccacacccagctaatttttgtatttttagtagaagcggggtttcaccctgttggccaggatggtctctagctcttgaccttgtgatctgcccgcctcggcctcccaaagtgctgggattataggcataagccaccgtgcccggccaatagtctccagtttttaattaaaacatgaaatagctacacactttgctttgagaataaatatgctatgaaaatatgttttttaaatcacccaaactcttgatctaacatttagcctaatcttaatagttaccgctaagcctgtttcataatctcaaagtggggatagtaatagtatgcacagcgtgtgtcactgaaagtttgtgtaaaggtatattttatatgaaaagcacttaaaatagtgcccaacaaagagcaagccctccgtaagtgttagttaatatgattattattaatagataaggagagttgtcccacttggtttataaaatcctttttttcttctttgggctttgttgaatatagtgagttttcataaacttttgttgaatttgaaggtgtacctccaccagaaaacaggcagggtctgcaggaagagaaggatccatcctgcagaagcttcatacaaatgatgaacagtgtggcgagacatcaagatgtaggttttggctctctgtgataattcagctgatgggtgttgatttatacatatttgttagtttggtttatttattaaaagaggaacagaaagaaatatattagatcagggtacactttccttatgcctttcctgagacattcctgtcctttggcacttggactaatgacccatgtccccagcataatagccatgtctctattcactttgtatatcaaaaagcacaccctgctctatccacactcacctctcttcctgggccctaaactcatatttcagttcagagtcttcagcaggaacgcatttttaccctaaggcacctaactaagtaagccccttgacagggaagaacagttttctgtggagtccatttgctcctcatgtcattaaggtttcagatagacttaagtgtagcattaaagaataaagagcttttcaaattacccttgacactgaagaataactgcagcctgcccaccgtgaagcaagtatcttgacagtgacagaccctcagatgtttccgtttctgatgctaaacatctgtctcagatgtttctgtctcccaccactactgctggggctgggaacatttgtccacaactggttgcagaagttagaaattgttttgagggccacaagggcaccctataaccttgcaatcaatcatatagattaaatctgatttgcaatcctaaaatcctgtaggaatagtcaatcaaaggcaaatttgtttttacatcttgtattttacttcatgcattgttttaaaatatgttccagaagtccggcgcagtgtctcacgcctgtaacccggcactttgggaggtcagggcaggtggatcacttgaggtcaggggttcgagaccagcctggccaacatggtgaaaccccatctctactaaaaatacaaaactagccagacatggtgtgcatgcctgtactcccagttactccggaggctgaggttgcacttgaacccgggaggtggaggttgcagtgagccaagattgtgccaccgcactcccacctgggcgacagagcaaggctccatcttaaaaataaaaaattaaaaataaactatgttccagaaaacactaaccccaccttagaagctccatgaaaaggggattttacagacacatatgaacagaaaaaatataccatgtgtgtctataggaaatgtataatgctctggggatattaagattgattttgaaaaatttcagaatttttgcttaattctttttaggctaaggatctgcaaatattttctgcatagaaccaggtagtaactattttcagcttttgggggcatatagtctttccactcaactctgttgttgtagcatgaaaggagccattgacaacagataaacaaatggatgtgtgtgtgctccagtaaaactttatttatggaccctaaaatttgaatttcatataattttcacatgtcacaaaattttttctctgagtcttttaaatcattttaaaaatgtaaaaaccatcctcagctcaaggccaatacaagaacagctggatttggcccgtgggccctaacttcccgaaagcccctggttaatgtagcctgccccttgtttcccactctatataactataggactccagcccggcacggtggcttacgcctgtcatcccagcactttgggaggccgaggcgggcggatcacctgaggtcaggagttcgaaaccagcctgaccaacatggagaaaccccgtctctactaaaaatacaaaattagcctggcgtggtggtgcatgcctgtaatcccagctacttgggaggccgagggaggagaattgcttgaaatctgggaggcagaggttgtggtgagccgagatcatgccattgcactccagcctgggcaacaagagcgaaactctatctcaaaaacagcaagaagaaaaaactacaggactcccaccaccccacctggtgatgctcatgaacattccaagagagaaggtcctacagaccagagctactcaacgtgtgctctgtgaaccagcagcttcagcatcacctgaaggctggctggaaatgcagaatcagctggccacgatggctcacgcctgtaataccagcactttgggaggccaaggcaggtggatctcttgaggtgaggagttcgagaccagcctggccaacatggtgaaaccctatctctactaaaaatacaaaaaattagctgggcgtggtggcatgcacctgtaatcccagctgcttgggaggctgaggcagcagaattacttgaaccaggaggcagaggttgcagtgagctgagatggcaccactgcactccagccaaggtgacagagtgaaactctgtctcaaaaaaaaaaaagaaagaaagaaatgcagaatcagtgaccccatttcagaccaactgaattagaatccctgagggtagggcccagcaatccattttaacaaggtttctgcatattctgactctgggggaagtttcagaagctctgtcctggaccacaccttgtaaagtgctgatttgggaacactgaatgctacatgggagtgtcagaacagttcatccatgtcagttaacatgaattgaacccttactaggggtcagaccctttgctaataagcactggtgatttgagataattaattagatactgttaggctcttaatagactgggagtttgtcttacaatcagagcctcggggaatagttttgagtggcttttcttcctaatttcttctgcttcctagtttcctctttctacctgctctgcaacacacaagatggcagtttattgtgctaatatgagggatgtattgcaggctgccttgatcataaatgccacttcactactaacgtcctttcagctactgaaattactattaataaacatccttatgcctcttcagctgctgtcttttagaatgctaacatgcatgagtttggggtttataggaacaatttattaaacactagcagtaaacatcccaacagaagatctggaggtacgctcagcgcccactctccagccgttcttattaggagagggggaattgctttttcagctttgaaatgctgtgtgtttgagatccaccagattcatcagccctcctcccaaatcacagacgtatctccatgttttagagcaggacaaaggtgtgggagttcctgggggaaccgtgaaagtgatgaaaccaagggtatctgccacatggcttctccgccatcgcaccagctgcccatcagccaggcctggataggctgctgtcagcttggagccagggcgccctacagctgttcttcacatgctgagaataacaactttgagaggagattgccaaggaaacacaggaaacttgagtatgtgtgagagagagggagagcgagagagagagagagaagagagagagcatgcacagaaacattcatcagcaaatagacctgaaggagtgggacagagcaatagcactacaagtctgaaagcacatggacccctgccttctaataaactggcctgtgaaaaggaaaggtcaatggcttgcttaggccgaagatacacatttcccccccaggaacccagcagcaaaatataaagatggagcgtggggccagaaggcactcttgtttgtctcctcgtggtactcctgtgagaggtgctgcttggagactggaggctcaggcactctgctggtttccctggtttcaagcttccatgggtgctcagcaccacagcaacatgtcttgtgcctagccgttagtagaggaaagctgattaacaaataccgggtttgttccactcttagccaagggtgtagggctgtcctgaattagtgaggctttctgaatattaagctccacatccttttttacaaaaaatgttggccagaacttttctgtaatttattcccctcaacaaccccatgagattggcattgtttgtcctgttgagaaaactaaagctcagagatggtgatgaacttacccagactcacccagcttctgagcgccagagccagcggtccagctgggtctttctgacatcaatgcctttatccacccactccactgaactatggtccatagtctactcaacttccccacgggtccactgctttattctggagggtagatccccggtcacttgggaatactaaaatttcatttttgtgcatcttaagattctggagtgacttggtgtaaattccttccagtgtctgttttctagatcctaatttgtaaaatggagacatggaaataaagtctcatgtatttaaataaaacacagtgttcacatctctacatcatctcacgagcacatgttctagtggccagaacacgcattcgaaaattagcaggctcatcgtaagatgctctgtcagttataaaatgactgcccataaagctaacctcacataaacttactccattatttgtttaatgccagtggtagaataaggcaaccctgaagttttgttatttctttttttactcagattccatatttgttgctttgcccggcaatcactgggtagagaacggtgaaacctgttatctccaaagaagtttcactttaggattccttctaagaaccctaaagagtatgatttctcctttttcacaagagcaataaatttggaaagtgatattaatatgtactaaaattccatccttgttgagaaagcaatagaatcgtggacctggagggtgagatggcagagcctcctcccccaggatcagatctaggacctgcctctgggaacttttgttcccttgcctcccaatgagtatgttcctgattttttttttcatacagaattttcatttttatttttccgaaaagtgattctcattctcatgcaaataataataataataaacatggtagtgccccaaggccccaaatctaatttcctctcccagcttcggttttcaatagaaagacaaacaaaaatatgttttttggttaggaaatcatgctcatatgcaatgtttctgtttcattttaagtttcttcagacatttactagttagtgtaacacaggctgctataacaaaacaaccctcacattttccatagcataatagaaatatattgtttgctcacgtaagagttcaggtgttactggccaggagtcatttttctccatgcagggatatggagggcccaagttccttctgtctcatggtctcatggcttaaccatcctttaagactgtatttctggcagaaggagaaacagagggaggagaatacctgcttctgaactgccttagactgacagggacacactttgttctactaccactcatggactgtctctagccacagagcaccacttccttgcaatgggaattagaaatgtaattcctggctgcacagccatttcccagagatcatgctctaccatgcaacagtgaggttaaagtgcacagttgaccatctccgctacaagacaagagcccatgccttcttcaaatgtgctactcacagagaatttttcattctatcagatacctaccccatcgggccctttgcccccttcccttcgatggcctggggacatggcttcctcagaaaggcctgttgcaaacccatgggcacccatgataccagacatgtcccctagtgtaattatcatcatcctgaatcatctaattccctcttttgcttgcatctccccaattagactgaattctgtaaaggcagggaatttgcctatcttgtccatcactgtatccctagtgcctaacactgcctggcatattacaggtgctcaataaatatttgagaaggaaggaggaaggagggctctctccggaatagacccagtccttgtacctgtcatttgtaccatgtgggatttcaagagagtagccaagaaatggactggtcacctttcaggaccaaggacccaccctctttggagtgatagcagctcaccctcacacaagcccttttggcaacctctgatgatgactgaaatagatgaaagattttctgcctttggcttccacatgcttctaaacacaatggaacactattcaacaacaaaaattgaatgaactattaatacatgctgcaacatagataaatctcaaaataattatgctaagtgaaagaaggcagacaaaaagtagtacacactatgtgatttttatttatataaaattataggaaatgcaaactaatgtatagtgacagaaagtagatcaggctgggtgcggtggctcacgcctgtaatcccagcactttgggaggccaaggcaggcggatcacaaggtcaggagatcgagaccatcctggccaacacagtgaaaccccgtctctactaaaaatacaaaaaattagccaggtgtggtggtaggcacctgtagtcccagctactcgggaggctgaggcaggagaatggcgtgaacccgggaggcagagcttgcagtgagctgagatcacgccactgcactccagcctgggcgacagagcgagactctgtctcaaaaaaataaaaaaaagaaagtagatcagcagttttctgggcatagacatgtgggatagggcaggggccagtgggtgggtaggaaatttggaggagtaatggctatgttcattgttttgattgcagtcatggtttcctgggtgtatacatatgtcaaaacttctcaagttgtacacttcaaatatgtggggtggactgtatatctgttataccttaatagagctatttaaataaataaataaataaataaataaataaataaataaataaatgtgatgataaaagtacactaaccccaaaccacatccctccaacctcatcattcccaacccttgggtagtttgtctctttaaaaatatttcatcggtagataggtgtctatctccatggcagaattggcaagtatgtatttgtggcatccttcggagaaacagcacaattctgttgacccctgtctgagtatggctttcagatcagaaaactgagtcatgtggactgagtatgggccatttagattttctggtctttgcacacacctacatgaacatatataagctctcatattttcatatctacttcttcccaggtccagagccaaacccgtcactgaccccccagcccaggcgcccagccactccccaccgctaccatggccgaagacgcagacatgcgcaatgagctggaggagatgcagcgaagggctgaccagttggctgatgaggtaaggagtggagacctaggaagggaggcaaaagatgaaggcctgagtggtttgtcttattcaggttcaggtagggaaagcctttctttcaatgtctcaatttcttttagaaaaagtaatatgactttgattttctgtacacctaaggcttctgtggaccagaataagttgattatagaagctgcatacaaattactgtcttggccctaactctcaatttccagaaaccttgagaagtcaaggtcctctaagaaaagaaagcaatgtctttgggtgccttaattcagtgctatgctggagaaggctcagttccgagaacagattgttaacattttcaggaactttgcaagctggttgctaaatgcagccattattaaaactgaattacataaactgacaattagatagattctattaaaatcaaaagtaataaacactcaaacttcatcacttcctaattattttgctacattttactattatccatgatcttgagattcatccattttatctgtagggtggaaataaggtataataatgtgttaccatgtgtctttccaacttcatgatcagtaatatgaagttgtagcttaaaatcaggcagagctgggtacagcggctctcacctgtgatctcggctacttgggaggctgaggcaggaggatcgcataggccaagagttcatgaccagcctgagcaacatagagagactcccatctctaaaaatatttaaaaatttaaaaatcagacagagtaagagtatttatcacccaagaatctgcaaatactgcagatcaggacttgacttattgttttgctgattgtctagactttaaaaagtagagaaaatattaataatgcagattaaagttaaaagtatgtatgtctgcagccattatactatgaataacacaaaaagaggaaatcttccagtatttgaaaattatgattctctaaggcaaagaaatcctttttgtcattcacaaatgagtacaattccaacacatgccttcattgtttaattttcttcttactcattaatatacatgaaaatatccaaccaacattcatgtcagaactactctggttcatcacatggttagctgtagacacaaaagttcagcaaaaatcagtaaaagttttctgtgagaatcaattggctatgcggaatttacaataaagagagtattgtatattttattattatttataaattttgtgctattcatcctttatatcagtaaaataataaacttgaatacatgtatgtatttgtgtatttttcccagagagccggtagttaaacctttaccagcagactgctgcttgcagccattctatttcaaaaagcagctggctgacagctcttccagggaagttaacatccttcaggttcctgcagaatcttgttcaaaataagtttgtcagttaaaagcaaagctttgagaaatcacactggttgttggattctagtcgtttcaaaagaactgagaaaaaagtgacaacgcagtgcccgggggaccattgcagagctcagcctttccgtctcgttttttcttatctaaggatgaagataattattatagctctctcctataggctggtcatttcaaacatgcttgatttttttcaccctaaggcaacaacttaatttgtattgataagaacttccaattgtgtttctaggagctttgtaagaaacttgatgttatattcatctcgattcatgaaaaattatgtttgtgtttaaaatttaatgttcctggcccagggaggccaaattagtcctctgagtaattgagataatttttcatgcattctgagcatgcaaaattatcttctccagattactttgtctttgatatcaagatcagcttcatatggtttttattttctgaagataagctgtaatgtaattgctttagggaatctgatcatgtaaaaagcctgataggaaagagtttgaaaatgtaatgacattttttgtttcacttgccaactgaaaagaatatgtgacagagaccctttgtgtttctcaagtaaataaagtatttctgattttccaagatctctggatcctgcactcataaagtttatgtttgtttgttttttaaatcttagtcgctggaaagcacccgtcgtatgctgcaactggttgaagaggtaagaagtgacagtattttaagataaaggaacaaatcccttatgctgatacatcctttcctagttgctatgatgtttccttgggccatgatcccctagattccagtgtggatgtagcctatcagaaaggcacagaatgagggagatgctgtatttaagttgccagatagccatgaagacaccttcaccctccttcccagcccaagccacctctgtagtctggtctgggaagcagagaataatagaatttccaagtctgtgctctcaagaaatcacagacgattgtatcactttaagcaaattagagcaattcttaatatacaaaggaattatctacataaaactttatttgtaattatttttgtgcctataaattacatctaatcttgagattctgttctaactttagccacatatatgacttttaaaaatatgtacgcatataggtgtatcatttttagaaattgttctatttaaagtcaagcactaaaatttatgaaaaaataggaaagccctttaacaaagggaaatatcaagtccaataatataaatacagaagcttttttatattcctgcctggattgagcatccatttgccaggcagggttaatgaatcccaaactatttttaaatgggtaaaatggggcaaatagcaataatggaatcaaaagggcacttgcaatcataaacctcactcattccaatttggtagagcagcagtcggccaggcaaaataaatggattaattgaacttgcccaatgggagagatgaagtggaaaaagaatgggttggactatacttatcttaacctaataagacaagcctaatagtttttattcagcgagatgctgttttagctgtgctttgaactgcttatcagtatataaattcatgtgtgattatcgtttttagagatcttgggctttctctggcagaatgattaaatgagcctactcccctcatgctatcataaatttcatatgcaacaacttgaaagggaagaaaagataaattttacaaaggataaaaggaaaggcagccgcctctcacactctaggagccaatgtcctccttctcttatttctgtagcttcagcttctcacctaggaatgagatatggctaaatgtgaattgccactggaggagtgggaaggaggtggcaagcatgcactccctaggaagccggggaagtgggtggggcggggggtgggagggtggggcgaacgtaacaaaatctgttatcccccaaaatgataattcgagcctgcaatgtggcacaaacgggacacaccggaaggcagccctagcaaagcaggtcctcagtatagggaagcagcgttctgtctaagtgaagagcaatattttatctgcactgtccagggaatgctgctgctcatgcagaaatacttgaggatgaagaaggaggtagatattctaaatctacgagtacaggcaagactcttagcatggacttattctctctcaagttttcaggaggaagaaaaatgaaagaagcccatcttagtaatatgcctacatgagctctgaagttaacctgaagggagcctagaaatcaactgagatatttatttgattgtatattattacattattatcataatacatccttatggctttcaaccatagcctccaatcccatttttctttttttggttacgtgtgtgcacatctgatataagtttccaaaatatcagaaccgtcactaatttgcctgcctgtgcaatgttgaaatgctgcctagactgtggaaaggagcaaaacaaatgaatcagaacgcacaccttgaactgatcccttacacatcagagtctgagacatggtcactttttcatgtatcgtcttaaactgcaagccatgtcgtccagtcttcaaaaatgagtatctgctctaatttattctgggggaaaatctctcaaaagcttattgattgaagtaggattctcgaatcatatgtttttgtttctcctaaagcatttttcaatcaagcatgcagctatatcttagaacaaggagcaaaagagatggaagctatctcctgcctctaataaatgagaggaggctattagactttccatgcttaggaaattgtgagcaaagtgttattagagtagattgatttgctcttacttcctcctgggttattttctatttatggtcaaacatcctgatgtctaggacatttgctgtttagatgatattctgcttttcaatcaaaaaggacgttctctaaagagaatctgcattaaatattcatcaaggacagaaatcatttggaaaacctgaggattgaagtaccaggatcttactcatgatcccaaggtttgacagcgccatataatctgaattgagctgaatccttattgaaattcagtctcaaagacaggaaaggttactaaacttgtgaagtctccctaaggcaaacaatctctcagcggaatatacaactttacaccatccttaacagactccagggtgtagccgtggttaggggtggggccttgctttttaatagtcatcattatcagcatctcaaggatagtgtaaaactacacagaggtgagtggagaaagttcagaaaaaatgaatgccatagataggtaaaaaggttagaaatcatgtagcacttggttctcagcctggagttaggaactctcttttggtgaatgcatttcaacaaatattcacagaatgcctaactccgggataggaagggagatgtaaattggtatcttgctgggaaacagatatgtaagtagctctgcaaattcaaggccatatttgccttaggtgcataggggagggaacaactgattctggtaagagactcattaaggtatcctcgaggaggtagtatttaattccaggaaaaaaagttaactctgctaatgctaaattcaggaaatggagtctgcacatcaatgccttgggctatgtaaattaagcccaggaaaagccccacagccttagggcaggccaattcagagacaccacataacttccatggagtggttattgcacaactaatatttcaagaatgttttagcatccttctttttatgccaacttatctttcaagactttcaagacactttggccatgcaaagagaataagcattctaaagtggtgtatgccaaactttcccctaaaaatgaaaaaaatcaggttgagcagtccttttcagatatgcagatgtggggtcttttggagagagtgcctggagtgttctagttttagttcagatgttttagactttgggaaaagcatctcagaacggcaaaagaaagatttgaaacgttctataaagattgtcttagttcatctggaaaaatttttttaaaaattaaaatagagaaataaaagagaacagaaagaaatggaaaagaaaaagtaatcctttgtatcttcaactcccctgtttttaggtaggcgattttcccagcaatctcaaacagaaactaagaattgagcttagataaaaatagaaccacctcctcacactcctagctactaaaacataatactatttaaggaataagagaaagtaatattctgcctccctgaaatcatgtctctatccctgcccatctccttaagcttctaggtccccacaaaagcaacctagttatttttgatagaagctgtcagcaaaagagtggagccaaacgcaagttctaacatgtaccgaggtgaaatgtgccagatactctgcttagagctatcattgtcatcatcatcaaatgtacattacctaatttaatctttgttagcttccttctactactactttgatctctgttttactgtagaggaacttgaggtacacagtggttaagtagcttgcttgagacacacaggtataaacggcagagatgaagttaaaacccaggtctacctgatttcagagtgtaagttcttacgcatcacacttctcttccaccagcatctcttacaatcattatttttctttgagaattccacaaaaagaaaggatctaaggaaacaaagcagctcattctaaatggattgagattctactcaatgtcttatttcctgaactcacggaggcgtcagcttcccatagaggtgaaccttgagaggctggaccctctgaggctcattttactctcataactactgtgagaaattatgagggagcagttactctccccatttgacagctgggaagctgagacacagaacaggtgaccttagagcactagcattatgaagataggtctagaattcagaagtaatgactcccagatcctggttctgcccacctgaccaaattgtctcacaaacaaaggaacacatttgagaggtcatgcatttgtctacccgttatccttagtgcctagagcagagtagaggctcaataaacactaggaaggaaggagggaaggaaggaaggatggaaggaaggaaggaaggaaggaaggaaggaaggaaggaaggaaggaaggaaggaaggaaggaagggaaaggaaggaaggaaagtaaaaaggagcctgtgagtgattaaccaaccactcaatcttttcaatcttactcggcatccctatccttatcttaaacgtggagaaacattctggaaggtcagatgtctcttccagggtctcgtgactggttgctggctgagctaagagcacaacccagtgttcgtgactcccacatcagtgctctctgcttctgttctcccaaactggggcaacctaaaaaactcttgctccctcaaattagttgcgtgaatcattctagtgttaaaacattcagcaccaaattggacaaatgtgcaattatacttgcagggctccacataaaaataaatgggtataatagaatatcaagaaagtgtaaacagatgagggctggactgaccaaactaaaatcactaacctttttcccatccactgtccccagtagaatggagcgaagatttcatgtgtggcctgattgggccctcgaggagaaagtgctctccgagatgcctctgccctcagcagaacctgcattgtcacatccctatgcccgaatagccatctgccttttataatttcatctcacaagaaatggagaaagaatgcagaaaagagcaaataaatcattaaaatacaggctagtacagacaaaagcctgtttacaacccatttaaagaaaatattttgaaatgtcttttgtagtctagaatcttgctactcaatgtatgtccctgaaccagctcaatatgtcagggagcttgttagaaatgaaaagcccaggctctaccctagccctactgaatcagaatctacattttacaagatgattcatgtgcagaggattcatatgcacattccagtttgaaaagtagtggtctagaagcttcagatactcgataatgatgatatttttagtttgcctagataggctgctatagatgcattttctgaatatatttattttagaaacacttattttagaaacactccattctagcacattccacatattaatttgtttaacgcacatacttcctcaatgaggtattaactgttgtcattgctgtcttacaaaggagaacggaggcacagaacagtcaggacacttgcctgaggccccacagttagggaatgaaatcaccagcattccagcccagagtctgtctccacagtctgcgctgtcaaggactcctgaggccaccctgggccagccctgtccatactacatcctgactttgccactaaagcctatcaaagtgtgctcaaaggcaaggtaggcttttgtgtcctggagatttaactgcacacgttctctaaaatggtgagtttataaaagctcacagaaatcattttcagcattttatttttcagaagcactattgaaatttaattgttaaaatactatttttttaaaagcactttgttggcctccactagtatctctctctttctttcttagttcaaagtacatcagtggaaaataagcaccatgagagaggtcctagcttagaatttcttctgggggtaccatgagctttacttgaaaaaccaattcatccaaactataagcaatgccattttatacccattaacagtcgccctgtaaaatggaaggcattaactgattaggctttctagaaatgaggattcttaagtatgagtgatacagatatctttgttccttctgtcctgaccaccaactcctgcccatggttcaggtggtatttggtttatttgaacagtaaggagatgagggatgccttttaaagacttccccggcacagaagaatttctgtaaagcttgtaaaggaattattttctcacactagattattatgcagaatgttagatttcagaattaagagcccttatttctcatctcaaacccattctaaatactgtagaccctctccatagagatagaaaaatggagagagagtgagtttccttttgagctgtgtttcccaacctttgtaaagccatgctctcttctgatgaacctgaaaacctcaacccccaccaccaagattcttgcacatcttcccatggggcatccctccccaatttcactgatgaagactttctgatagatagtgccaaagaagaaaatttagactagaagatttccaaaggtttgctttctgtgattggtgttataaaaactgtagacacgtttatttccaaacataaaattacagtataatatgaagtatgtgtattctgatttcatgcaggccccaccccagccctaccccatggagacagtgctccatttcctcattctgcctaaagcatcactggtagatcaagtccacagctggcccattcttctatccctccataacccctcagggctcttgtcatactttctcccttttttcttttggtccttcttcattttccatttatagggctaattgtccccttactgatttctctttctctcttttctctctctaactccttttcaactttgctaccattattggaatgtagagtaaagatgctggtatcaggactttggttatgttggatgaacaaggaggtaagttcagatttcttcagtaagaacaattcctcttctgaataatgtgcattttaaaattatttgtgcatacgcagatggtcgctttgacatgtgttacacatgtacacgaatgtgagggttctagatttttcatcttgctttttttctttctctgttgaaaagattggtaaatgtatggaaatgttgaggccttcttcatgagtgaatcaatgataccactatctctgttatatatgttggggtaactgaattttgaaggcaaaagccattttttttaaatgatagtattttggacagtgtaagaattttcttattatctttgcccctaaactttcccaataaatttgattttcttctaacaatacgtagatagaatgagcgtatggcatatcatgttgtctacttcttttgaccatcccaactcagtatctagtagttttgggtatttcttaaatacctgggagctgtttttcacagaatataacctgagggaaattatctggaaaatacaacattgaaccaattgaaatatttggcctgttttaaagattattacagaaatgctagaagcaaggaaaatcagagagccagcattttaatatagcatctctatacctaacatggaaactgaaaagggtaataccatcatttttcttcatctcaatgtatctagccctatggtgagattgtacataattctagccactagtcagttacctgattccgttctgaattcttatcataataaacagatttctgcaaagtttttttctttttattcatattttgtaaaagcattagaaaattttttggagtcatgactattttttttatggcaaagataaaaatgtacaatgtattcacaacacaggaaaccttaaataaactctaagcataaatctcaagctgtgggggggaacgtgcctgacagataacagagagaaggcacttctcctaaaattcagagagcccttgcatatcaaagaaaagggcagcaacctaaaggaaaaatggatgtaaaataagacgtcatcacagatgtatgaaaccatgctctaatcaccaacaatgacaagataccactttttagagcagactggcataaattttaaaaaatgataataaccagtgttgtgaatatgttgggaaaacagaaactcctattccacagttaggcactgtaacctgatacaaatgtcttaaagaataatttgaaaatatcttcacattttaaagggcactcatctttgaccaagacactccactcctagaattttacagtgcagatatacatttacagttatatgaagtaaaatgcatgtggcttactcataatagtgtaagactagaaacaacttaagtatctgtcggtggggagaccaacccaattaattgtggtacggccataaaagaattgttctgccaccaatataatacatgaggtagatctttatttactgacttctgtggagttggggtgggagcaagaagggactggaggaagatgcctcatttggggtcccctggggagcaaatgccaggaagcaattagaagcaaaagagatttgttggggaaatgtctgtgataggtcaaggggagagctgccgggagcaggcagaggcagccttcagactatgaagcaggtctgatgcctataaaagtagatgggtactgctctgagaagccctcggccaggccaatggggagcccgagagcaaagattgctgattagaggagccctgtgttgggcagaaatgttctagcactagtagcccattgtgctcagccattggcttgaagcatcccaggaagagcctggcctcaatgtaaacactgtggcagcctacataggtgcacagctggaggcatctggctgtcacataaaggctttcggttttacattatttatttgtattaaactttttcaataaatatataccaattgatccaaaaaatggagaaaaaagtttgaaaaaaaagttgaacataaaccccaacatttttccttcaattttcacaatacaaattgtcaaaagttgtacacaaataacaaagtctactagagttccatgttgaagatactgcagtagcaatggaagtcttaagaactcccccaatgggtttgttattattacgtgacttgttggctggatctgtgtaacaatgtcccaggctttgaaactgaggatgcagcaagtcattgcttttaaaaaaaataactaaacaacaggtgcccaatagaagagtggtacctgatttccggtgcaaaattgaaacctatacactcaaacctaggcattatcattcaggacataggcatgggcaaggacttcatgtccaaaacaccaaaagcaaggcaacaaaagccaaaattgacaaatgggatctcattaaactaaagagcttctgcacagcaaaagaaactaccatcagagtgaacaggcaacctacaaaatgggagaaaatttttgcaacctactcatctgacaaagggctaatatccagaatctacaatgaactcaaacaaatttacaagaaaaaaacaaataaccccatcaaaaagtgggtgaaggacatgaacagacacttctcaaaagaagacatttatgcagccaaaaaacacatgaaaaaatgctcaccatcactggctatcagagaaatgcaaatcaaaaccacaatgagataccatctcacaccagttagaatggcgatcattaaaaagtcaggaaacaacaggtgctggagaggatgtggagaaataggaacacttttacactgttggtaggactgtaaactagttcaaccattgtggaagtcagtgtggcgattcctcagggatctagaactagaaataccatttgacccagccgtcccattactgggtatatacccaaaggactataaatcatgctgctataaagacacatgcacacatatgtttattgcagcactattcacaatagcaaagacttggaaccaacccaaatgtccaacaatgatagactggattaagaaaatgtggcacatatacaccatggaatactatgcagccataaaaaatgatgagttcgtgtcctttgtagggacatggatgaaattggaaatcatcattctcagtaaactattgcaagaccaaaaaatcaaacaccgcatattctcactcatagatgggaattgaacaatgagaacacatggacacaggaaggggaacatcacactctggggactcttgtggggtggggggagaggggagggatagctttaggagatatacctaatgctaaatgatgagttaatgggtgcaacacaccagcatggcacatgtatacatatgtaactaacctgcacattgtgcacatgtaccctaaaacttaaagtataataataataaaataaaaaaatttaaaaaataaataaataaacatatacactcaaataattagcagtttcaccttatttattttttaagttaataatttgtaacttcatgtgggtggaaaaagagacattacaatggagggtagacttaggaaagatttagaatagagccttttccccccgaacaataaagcagtgacataaagacatggaaaataatatatacaaacctggaatgaaaaagagaaaacatgaataacaggcttacatgagtgataaattgcattgtactttgatgaagaaaatctagagatataatttgctgaaatcttcataaaaatgcaaaaatatatcttctttagcacaaattatctccagaatcacctatgtactattctccgagaaacaaagcagaatagaatgtctgtttgacagatttccccatgagacagttaatgttctcggctaagacatttcaattatagccataccacagtaaatgctgaattcctcagttaaacaaggatagactgggttttaccagatgtgtggtgagtagatagacactgatgagaaacacgcaactgtaaaacccccgaaagtaggtggtttctggccggtcttaaatggtacacatttcatttatagtataataggaacttaggaccttttttttttttttaattaggcagtagagacacagaaggacctttctaattgacagatgagcatgtcaacagctatcttaactgccatataagtgcattttaattttgcctttacttgtttagatcagtaactgctttgaaatttctcttcatttatgctctactaattttgtttatgcgtgagcaccaaaagtgttgactatttctacctcacagcagcacgggagcctcaagaaacagccattcttctaaagaaccatctcaaccactgttgggtcaggccaggccattccaggttgtccagttaaatgattgcactaggaaatttcctatgggattcttgctttatacccaggtatcgggagacaccaaggagcactgagcatgacaaccagacctggaaacgtactgagccctggaactttcattcctctagaaaatttgtcaccaagggaagtccccaaatgaccctggcactaatgtgggcttttacctgcatatctcttgttccttttgctggtctttgctgagttgtatgtctgttttgatgctgaagatgtgacttttgggaaaatctcctgggatcagctccaaactaaacagtgaaatatttgactactgtctgacagaagaaagacaaagtaaattcctgtccggagagtcagctatcttaaaaggttcatggcactacaaggtggcatctgaaaaaccatctctctagctaaagtccattcaccaatatctgttatgaatgactaaggctgtacttagtcatgatagccacatagggctatttaaatttaaataaatttctatatgttcataaatgctaagaaaaatgaaattcatagaggcagcatcttgtaactggatatactcatgaaggctgcatactagattaatagtattaatgcttactattcttctactgatttttactagattgagaatactaagggccccatgttggcttacttaggagagattagtagaaattttgttttcaccagtcattggaaaaatattaatggaaaacattaatatagatccttgaggattctgtcattggtggatctatcacaaataaccagtgatccaatatcatggcaaaagaaagcccaagctctggccccaacatatagtgtcacctacctgaagaccccctccctactcaaaatgttattctcctcccagcccccaagaataaacagaaatgagccagaaaacaagcttagggagatcaaaagcagtcaacactggatggtgcgttgcatcagcctcagagatgctgctgttcatcccagaatgagatgcttataagcatttcctgagaagcatcttcacagaaatcattgaagtgccatgaagtcccaatatgccaaacatctccacaaacataactcagtacactctaaaaattaatattattgctagaatttctgcaacaaaatgactccacaatattttttaaattaaaggtttgacttagaattcttatgtaaatatatattcaactgatattggtagttataaaatagtgttctgaatcaactattttctgaatagttttctgaatcaaattcagcttcagagttttctcttttagtcaaaactttgccaaattaagctggtaaccgatggcagagcccagctttctgaaatatggatttagacgtgcctgtttgtttttccctttttaatatcaattatctaattcataggtccaatacctgtgcaccaattcacatatatatgttacctcctaatctctggaagcacagtggatgggtccctaatatcttgtcagagagttaatattttggccaaaaaaaaaaaaaattatcaactcgctttgtaacttaggagaaactcctcaagaaagacaaataattgcatatgtgtccccacgccataatctatgcttatttcagctgtcattagctgggggcagcatctctccttctgagtccagatgcctcctccaatccatctcaagcctgcattcccagaggccattagcaattacttgattgggatttggcatccctattgtctgtatatataatggttcttcatctgatgatgagttcctttccccacaccagtccctccacttgaatatttaccttgatctacagactaatttattgcattcttaaaaggaaactggagtgaaatccttagaaaagaaaaaaatcttcttgaatgtaggggattgccatatatatagccttttaaaaattttttttaattgtaatttttatttttgggacggagtttcgctcttgttgcccaagctggaatgcaatagtgcaatctcagctcactgcaacctccacctcccaggttcaagcaattctcctgcctcagcctcccaagtagctgggattacaggcgcatgccaccacgcccagaaattttttttgtatttttagtagaaacatggttttaccatgttagccaggctggtctcaaactctggacctctggtgatctgcctgccttggcctccctaagtgctgggatcacaggcatgagccaccacacccagctatatttgcggatttttttttttaagccatcactgtgcctgtatttattcggcaaaagttctcctgcactaccttattatctcctccaggtattcaatgctggataaacaatgaaattttgttttcacctgtcatttcaaaagcataagagaaatagcagattcctcatgaactgaattctgttctttagcctcacgaaagaaaacacagtaggcttttattttccaaattcacagtctggcagtttgggtcactagtgaatgtatcttagtttttttggaagcacaatttccactgtataacttaatgtgaaattgtgtttaagtgataatgtatgcccttaggctggaaatgtacttatcagttgtattctaggcatgcctttattccaggaggcacaggcatgcatgcatgaaaatacagatgaaaagaggaatggaaatgtaattaggttttgtaattagccagcgaagacatccattgctgccttcctttaatggtcttttaaagctgttttaaaaatcctttcattgaacttgtagttatctcaatttggtgatacaattcaaaaaaattaatcaagttggtgtatgtaaccttggcaacctagaagtatgattcatttttatgactattgatctatgtacttagatacactaaggtcagctatgctggcagcagtgacaccatattgtcctatgttccaattcataatcctacttccaaagagacattcattctccctgctctctgcctgggcttggagcatgacccccattatagacttggaaatcagggggcagagaagtgaaatgccttccaaaacattcatagcaattaagtcataggatgatagaggaattgcaatgttccaggacttacaatgttgctgtgtggatgttactctttttttaaaaaacagcttttacgaattacatatgcacaatcaagtgcagaccatggctacctctggctagactgccactgctaggggaagaaaagacatccatacccattgcttatgattgctgctgctgctgttgtctccaaagaagaaaatggattctattttctacccttatctggttgaggatgcttaaaaaccaaaagatggagatattttaaagttgaagcagatcctttccttagtagcgttaaactggaatgcctaaaacataaactaacaccctgtttttttttctcctggatttcactggtgcctgagtaagcgaatatgctgtgctgttttcctggacactcagaatcaaacaggccttccaccccatcccatcatgttgaattacaaagtattttgagcatcgtttggtttgtttctttccacccatacctgtgtagggcagcggtagcagtcttcaacaatgcatcctcttggacaatgcattgtaatatctctctttcaaattctgtttcacatagtcatttctcatgttctgttggagacccccaaaaaattcattccacactgtcatccctttgtcctaaccagaacaactcgatcgtgtcgaagaaggcatgaaccatatcaaccaagacatgaaggaggctgagaaaaatttaaaagatttagggaaatgctgtggccttttcatatgtccttgtaacaagtaggtactgggtaccagctctaatctgtggcgtccagttttctttctttttttttttttcttttttaatgtcaaagtgaatgtctgaagttttgtctttttttctttgtccttttccatctgcttcattctgtggggataaaatacttgtgtttaatcagaacaactggaacgcattgaggaagggatggaccaaatcaataaggacatgaaagaagcagaaaagaatttgacggacctaggaaaattctgcgggctttgtgtgtgtccctgtaacaagtaggtgctgcctgcctgcctgaagctttgatttcccaaggcccatctccaagccttgacaagctcattcctgccaagctcataggcaggatgagcatgtggcatgcagaacagatcaataccgtctccaatgcattcatctcatagcatagatgatattagcaggagttactgttgatgcattaaaaatcaggcatactacagtgaaagcttcactgtcagcaacttttattgatgaacgtttcaacattttccagaaagtgtaccttgagacagaggctagcctcaagaaagaggcacccagggaacttccttttccccaaccccaagagtcaaaattacagatttagaaaaggctgcgggtaagtttggaagatgagaaacacatatgcgaaggtttgattttttccaaaataaaagagacaggtaatttggcccagggaaggattctataaattagagaatatgacagagattctccctttctactgcccaccagttgccaaattttgtcaatagatgctgccactgcacccaacacagaggcaatgagctcttcagcaagaagtgctcaagccttactcaaattggacccatccctcccaaatttttctccttggaagatctacccgtacactggctgaaatgttgaaatgtgtagattttgcatgcacaacatcacaaaacattcaactgttctcaaggttctgcaacgcttttttggaatgtagcagaaatgtgacatgtggttataaaggtttgcaatggaaggaacctaaaactgagggttctggaagattgtctcatttgactagtggtggaaaaagaaatgcatgagtggattgcccaacatgcatttggaaaattaaactccttatccaatctccctcacccctcccacttcccccttctaaaagaagactttttcctaaaagctctcctgatcctagcttttagaatagaaattgacgtcatttttagcagattatatgaccattcacatcctttaaactttgaggctgatttaaaatatcccacttcctgtttaggagggggaggggctcatattgcaaaaaaattaaaaaattctgctttttaaagagtgatctacagtaaagcctgattaactggaatctagctaactggaaacctcagctgcatgctcttgctcccttccatttttagcaaaaaagaaacaaagaaaaaaaatcacatcagaaatgtaaaatggtttttcttccagggtagtttgcattgtctcacttagtctccatcctcctgcaacttccacatctatgaggaccaaacaataagagttgatcttcacagaaaaggccatcaagcaatcagtataaatgataaccaaggaaagattcaatcaggtcttctaccttaagactttcaggcaggaaagtggctcaggagtctagcaaagatattcactcatcatccatgaaacaaaactttcctccatggccccactgttcattaagaaagtcatataattcatcagaaaaaaaaaaaaaaagcctcattaccaagcattccagttagtcaagatttgactgtatattcctttcagtggcaacttgcccccaggtgagatttccatccatttcatgataaattccaacagatacattttccccccttcatcaactgtgtgtgaagaaagggtgaaggcagggtcccctgggatggattctgatgttctaatgaaatgatggctcctacgaattccacttttgagtggtcactaatttccttaatgcacaagagaccctaaactaagcttcaaagcttgactgaggtgttccctattgtgtgtaaataatgctttaaaaaccatgtgtcacaacgcagtggctggtggtgccctggactctctgagggcttcgccctgtctcggcatgtttcaagggacgatggtagatgtacggcagtgatgtgagtctatgtgcagcattgtgggtgcagtggtttgccttctttcagaaacgcatacttcccactcctttgactttgccaaagatggtatagcagacatttgacatagcagaaaacatcacaaagtccatataacttcttttaatctgaggagggaggagatggggagttggaaaaataaaaattaaaaaagccagactctaagccctattaaatttagtttggggatctcgtttcattgaatgggtccatggccctttggtgcaattaattttgactgcactaaggcctgcggcattatagacttgattgtgggagttgctgaaattccattggtacaattttccagtttgtctctagggttgcttggcccccagtctgcaagtattagagccagttttaatagatggctgtggtcctctggcgaaagaagaagataaaatgttaaattctggtgtcttacaaaaaaaaatgtgaaaatgggaccaaagaatgtctcttgtttttggactaaaaagcatatggtttctactatgtaaagaacctaaaaacatctttgattgcctttaattacaacactcaccaaaatatgctgcacatgtttctattgggcacaataggtatgcctggattttaagtcttttctccaaggcagctcagtgaaatacagcccatggagaccataccagcattaaaccactctcctccattacaaccccaggatagtttaaactaggagtttgtaagcactctctgccctgcccctcagcccaacaaagaagctactgaacctgcgtttcaaatcctcatgaaggctattactgtcctgctagtgcctttttcgagaatggtcaacttctggagtagtttggcttaaatgagaatgcttcactttctactcatgcctgtagctggtgcatgaagaagacgtagaggggtttccctttttggtgctagatggcttgttctctcttctcttttcctgcattcatttcactatgcttcttttactttttgtctctgtggacaaaggtttgtacatcaactctggatgtatggtgactgtttggaagtaccgatatattatctaattcaaatcactctagaggcaatgcaaagaccatcactcttggccaaccaccaatcctttatgtccttcatggagctttggaaatgttagttccacacgtgttgggaaaaaaaaatattccacagggatctttgcatgatggtgtgtaaaaacttggttgaggatgttttcttgatgacagtgtgttgctgtggtgtgatgtgcacactctacttggcagtcttgttttgtgtctgtctgccagtatgtttttctctgttttatgtctccaaatataatcacatcactaaaatagaattaaatgtcctccagctaccttaatccttgtccaaaatccaaactaaaccacaaaacaaaccaaaacaagaacaaccttgtgggcaaagattgcagtccattgcaatggattcgattggaagtgaaatgttgagtagctgaggcatggtggtggccaactgtttgggtctggattatgatatatcggtattatctaatgcctcgacttaaaactcattcgcttggttcgattcttcgcttgaagaagtgacaattgttgagagcttgctcctccacccctgtgccttgtcactcaccctctcttttgcataggcttaaatcaagtgatgcttacaaaaaagcctggggcaataatcaggacggagtggtggccagccagcctgctcgtgtagtggacgaacgggagcagatggccatcagtggcggcttcatccgcaggtgagcctcatgcagcatacactgtagcagttctctattgtcaagtacaaacaactccaaaactgagtggttttctaaaaaacaaccattttattgctcattaatctacatacctgctaagtgttcttttctaagcctttcctggaccttgcctgggtggggtgatccaagatggccccattcacttgtctggtggttggctggggctgttggtggggcatgtctgttcttctccatgtggcctcttcagcaagagagcccaggttccttacatggtggtagcagtattccaagggggcaagcctcagtgcacttaccaaacctttgcttgcttaccttgtatttgccggtttcattagacaaagcaagtcacatgaccacatccagactcaatgtggcagtagacaggcatcacattccatgagtttaattgaatagagcttataaaagagactacttacagaggggtgggcaggactaataacaaggaatggtgaagcacttctgagctagcaatagcaggaagttgttaccaccatagtcctgggggacaggagaaggaatgattatcagaacccagcaatagttacgactgtgggcaaggaactatcagtagagaaatacagccactaccaaagctaacagggagtgaaagagggaaataaatgctgtagcccctcactcctcttgccctgcagtttcattggccattagccaaagcctactgaaagccagagggtaagaggagctgggtgatatagtcatgaggtcagctcctgagagcacagagcaaagaaggtccaagaacggatttggagtgaaaatagagaataatgagcttcttattaatgatttattttgaaacctagaatcaaaagccaatttaaatatctatttttaaaagttcaaattatgactcaggggcatttcctttaaaaaaaaaaaaaactcaagttacacacatcagccaattcagaactcagctctccctttgctcccagggaaagtagcccaagggttctcaagcctggctgtacattagaatcaccaggggagacttttttttcttttactaccagtgtttgggcccaatccacaccaattgaaccagaatctcttgaagtgagacacaagcacctgtggcccattaaagctcctcaggtgattctgatatgcactcagggccaagcaccattgaactagaagtatctcttagctattgatgatcatttaaataaacttcttccctacaggaaaaagccagaaagttctcctttagttttttaattttctctgccctgggctgcttttgaaaccataatgagccagtctgcattgggagttaccatgggggaaggattttaacccttctgaatattttttagctcaataccatatatactagggaaattctgaaataagtacctccttaactttcaagttggactgtgaaaaaatgtaatgtgttttgtgagccagctccttcctcccattcccattccactcaacctgaaacaatactcttttgtcacagtttcacagtttttgactctgaaatcacctatgcaccatgccactaaaaaacccatgttattaacatatgagtaaataaaaatcatcttgaacaagtagctctccttggagttcctgggagcaagcagggttaaggggcaaactgtaattatcattactcttcccattggtgtcaatcccaagtgtgaaaagagatgagcacagagactctgacttagcacaataagctttttattgtattcttaatttgagtcttagaaattttgagacttaatttgagtcttagaaatattaagaatattcttagaaagaagaatatcgtttctaattccatcttcgtgctctgacctaaagtcctttcaaagaaaatgttttcatccttaaacaataaaaattgaaataaacatatgaaggggaaacaacataatggaaggagtgagaaagtagataaattaatctatttaatataccttctttaagaatagaaattcaagggttcaaaaagcaattttaaacattttttttaaatgtatgaaagctaaaatgtgtttttgtactggatggagattaaagatagataaagttgatgcccagaggacgacagatttccactatgctttgggtccttggtattcaatatgttttccaccctctgtcttctaaaacttgctctttggatcccagggtaacaaatgatgcccgagaaaatgaaatggatgaaaacctagagcaggtgagcggcatcatcgggaacctccgtcacatggccctggatatgggcaatgagatcgatacacagaatcgccagatcgacaggatcatggagaaggtgagcacgtggcagtcagcaagtccctactgcgagtcacttctgaaatgaccaacaggaagtgtgaagggcataacaagatcctcaaaacacgaccttggattcaggcgcactgatagctggaaatgttcttcattttccaagagaaaaatataggactcagcaacagaattggagtgaaaataagagggtcaaatttaatccagcaaatattctcaaaggctcctgtcagccaggcattgtgctaggcactgtgggccatgtacacatgagaaagacaccacccctactgccaagaaattcacggcctatgggaggctacgagcctccagatgaattttctatcactcaaaatataattcactaagagatccacagataaaatgctaaacaaggttagataaggaaagatctcaagaggcaaagttcgggaaaatctcagaataagttgactttgaattgaatcttgaaggatggttagtattaatagtttgtcaagtggaggtggtgaagggatagaatcagaaaatgggagaaagaatagtcagtatagccaggacatgattatgagctttgcttttataaatgccaaagctttaatgagaattcaaaaatatccaggttccatttccagtttaacagttcacatccccagttctaaaaacagggaattttatatgatgaaattgagtttacacaaggacaccagacttggctctaagatccaccatgtcaacgtgggccataagaaagactggagggagtagactgggaaggggtgggtttgggggcttaaaattagaagagattggaaagaaacactggaacgttcctataaagagacctagggcaccaaaacctgatattctacaacacagaactccgacataatttatatttccatgtttcatgccctttcctcaatcagtagggtcttgaatattgattacaaactcttatgtccaaatgctaaaaaggagaaaaagagacattatagatttaacgataattgtacatctataatctactcaatgtgggtaacttatgttgtgtgtttattccctgggagacgttgaagttctttgtctgatatcctaaattttcttataataattcattccattttggtgagcagagaaggatacttttaagatttttagaatcataaatctaaatagtagtttcttggtatgcaagcaacctccaatgacttgaaaaaggagtaagtaggcataaagggaacactttgtcctgttgtgttgtacatactccatgttaaaaatatctgattgcatattttgcctgatcagtatgaaaactacgcaaactttagtgttggttggcaaaatacttgtgctttgcttacttttgcaagtaatggcatgcttatcgttgttaagaaggctttcatatgataaagcttttaaagctgtgtaaatcaatagatattagaataataatgagagtttcaaaactcactagagccaacacaagctgacctaacccattacggcccagaataatgaactaaaaaatcattgctgagctgccctccaacagaaaaaacaatttgaaaaaaacaggaagtattcattttctattaatggacccactttacttgcagatgcagctagataatgcatcaaagccaattagggttccagaaggagcgtctttactaatagaagggtcaaactcttattgacagagttgaactttaagcaagaaaatgtgttcctggaaaggcaagtggcatcttgattctgccactttgaatttctagttctcatctttagggagaaggtttttcttctacgcccagtgtactataaagacagagacatatgcagctacaaggtttaatcagaagccaggcaggtggatggataatgactatttcaatttgtatcattccttgagtgcagaatcatttaagtgggagaagggtctaattgcctttgaataactagtttccagtcagcactttaaatagccccttttttttccagaatcaaaatccacacatgatttaaatagagcccacttcaacccagcattgccccaaatgatcatgtcgcatgaactgcacaattattaatagatttccaccttctcattgaagttctcatttctgataacgggacagtatgtggaagtttcctgcatatctaagatgtaattgcaatcacactgtaggggtaaggagagtcttatgatgtttctctcataatctctcatgaccccaacagcaacctttacccagctctatcaatcatgatcttttctcatcacttggatcaatagtgaagttttgggagtccttaacaatgagattttcaatacatcctcatggattgtcaagaaattactttatttaaaaatctcgttttctgcttaagggtatttatgtatataaataataaccttatatatataaataaataactatatatattatataatatataatatatatattatatgtatatggttattatatatatataaaaaccatatataaaaataaccatatatagatataccttctaaggttaaaaacataattttttcagaaaacttactgaattggaagcaagcctatatcagagggtttatgggaactgttgctaaggaaataccttagcaatgttcaaactttgatttaaagttatcagtggtaagttaggcatgcagtcccagctactccagaggctgaggcaggagaattccttgagcccaggagttccaggctgcagtgagctatgatcgtgccactgcactcgcactccagcctgggcaacagagcaagatcccatctctaataagtaaatatataaataaaaataaagttgtcagtggtagatgacaggcacacgttggaatacagtgaggctgattctttagcagtcctcacattcttctatcagtgagaaaacacagcatttgagagctaagactttgagttctaacagggttttgccattcaccagctctgtgacctgattgcctcacctgaaggatagtaagagaactgttcaaacctaggatcagaacaggctggaagtatgaactgggttctaaaagtcacctggcatggtctgaagttgaagagattcccggagcgttcagaagatgggctgaacagctccttctaaacttttactggctctttggtggtcatcctggccttctcacaaggacaaacatgtaacatatgttgggcactccagcaaatttagaattttctaaatagaaatataaaaattggaatgggacagccatcataaataaagtcctacagcatataagtagggtgatcataggggcattctccaaataccaggaagacatctacaaggagattccagacttttttttttttttaaaagaagctaattcttttatataataaaggggcagtactttctgtgtcaaatattgcatggggtggaattttcatatgcttcagaagtaagttaggtggaaatcacagatgctcattgaacataagtctgtttcagctcctcccagatcctttaaggatatacagagtaacctcatgctctacttcaaatatccccaggtgaaggcccctcagtgcattcttgtacaggagatcctagaatgtttgcgctcaggaatgccatcattttaaaatgaattatttttctcatttgagcttttcagagcatttagtctggcaacataataattcaatctacaggaacatttcacattgctctgatcctgtaactttcctttgcactgaagtgtcattatttctgataccatttgtagctggaaagggagggcttaagaaccaagtaaaattggtgagattatccattttccaattgagaaacctgaggtcaaaaatgtgagtctgtagttcaaaacaatcaaaatcaatgccctatcttactatgtaaatactgattttaaaagacaagtgtcaattatccaaacagatgacagagaaccattgccaggtattcaaagttatgattaatctggaaatatgtttgttttaactttgcaaatttctatttgaacatggataattctaatgtcctgagaattcacgatatgaactgaatacagaagactcagctcaataaaaattgggaagtacagcaccacaataggtacaaagctggtaatcattgagtgatactggttgagagaaaaacagtttggtttccccacactgcctggcagcctcctcctcttcttcccaggctgtagaaggatagacagcattaccagtcagggaaggacaaaagaaaagcctccatagaatcgttgtcttcacctctggttgctgatgcatttttctcagtggtgatgggaatcattcattttctggaatttaaagatttatgctggtagcagccctaggtttcatgctgcatatacagcaaacataacccaagcagtaaagagatcaaccaagagattaaagccagccagttacaaaatcatagtaaatgtgcatctgttaaagaaaagacagttattaaactcatagaaatgaatcttcagaaatgcaacttaaaaactattaagcatcccagaagcaagccaagttctcatacggtaacaataattgcaagataaactaatgagcccttcgttttgcaaaacattattccaagcacattatgtgtataaactcatttgatctcagcaaattgaatagtaagtgatgaatagtgtggactctgactccaggttgctagcattcagactctggtttctccatttattagtactaagacttcagacaaattccccagatcgtttctgactgcttttctcatttggaaaagtgagctaataatagtacacactttatagttgatattgttaatcttgatgttgtcaaagtttaatgagtggaacaaagtacagttgacccttgaacaacatggagatttagggtgtcaacccccatgcagctgaaaattttttgactcccccaaaatttaactactagtagcctactgttgactggaagccttaatgacataaaaagtccattaacatctatgttttatgtattatttactgtattcgtatgataaagtaagctggagaaaagaaaatgttattaagaaaatcataaggaagataaaatacatttataatactatgctgtatttattgataccatcagtttatatcatttgtttacaagatgaatcatcagtctgaaatcttcagtacacattaagcaattcaactttttcttgaaatgtcgtgacttttttttgctttttgggagcactgctagcatcactggtggcactttgtatgggtgcatgatgttattcaaggtttacagtattgcactaaacatgattttttttaaatgtgaaactgcaagagatcactttttactgcactatgcaatttactggagagatggtgaggatgattagtatcacagagcattttaaacggatgctcacaacacttgagttcaccacaataataggaggtggctatgaaattattagagtagtacagtatggactacagttaattttatacaattatgatttaatacttcacctttacatttctctcaactgcaaataggcccatgtatggtctatatttgtttaagtctcatcaattttaacttttcatagtagatttatatgtattttatgatagtaaataatagactagactagtatctacatatattttatccattcatgacatgcctaattttttctaaattttctcaatatttctaagtaacacattcatctgcaagtttgtcttaattgttgcaaatctccaaagcattttccagtgtatttattgaaaaaaaatcctggccaggtacaatggcacatgcctgtaatctcagcattttgggaggctgaggagggaggactgcttgagcccaggagtttgagaccagcctgggcaacatagtgagatctcatctatacaaaaaatagaaaaattagccaggcatggtggcatgcacctgtggtcttagctatttaggaggctgagatgggaggctcagttgagcccaggcagtcaagggtgcaatgagctatgatcacaccgctgttccccagcctgggcatcagagcaagaccctgtctcaaaaaaaaggaagaaagaaattcacacaaaagtggatccacaccattcaaacccatgatgtccaagggtccactgtacatgctcatgctcattagcaatattttttatcatccaggttggagaagagaaagctgagcccccaagatgtaatttgttcaaagggacactgctaataaattagccatggtttcaatcctacagtataagaagtgtaattcaacttggtccaacagatgtgaatgcctaccacagaagtcattgagtgtctttctaggatagaaagataaatcatatataagcctacgctctctggtagggaaaattattaaaaatgaaaattaaaaaagcaatgattctgaaaaaatatattcgttcattaaaaaaaaaaaatgaaaattaagcttctacggtcacattcaaatagagccatagccgtcattctgggaagacaaaagaaaggatggcccatgctgaccaaggaggttttaagtggtttcacccaagaggaagcattggacccggacccagaagggtgaatggatttttaaggggtaacctgagttctgtttcttttcccccttttctaggctgattccaacaaaaccagaattgatgaggccaaccaacgtgcaacaaagatgctgggaagtggttaagtgtgcccacccgtgttctcctccaaatgctgtcgggcaagatagctccttcatgcttttctcatggtattatctagtaggtctgcacacataacacacatcagtccacccccattgtgaatgttgtcctgtgtcatctgtcagcttcccaacaatactttgtgtcttttgttctctcttggtctctttctttccaaaggttgtacatagtggtcatttggtggctctaactccttgaggtcttgagtttcatttttcattttctctcctcggtggcatttgctgaataacaacaatttaggaatgctcaatgtgctgttgattctttcaatccacagtattgttcttgtaaaactgtgacattccacagagttactgccacggtcctttgagtgtcaggctctgaatctctcaaaatgtgccgtctttggttcctcatggctgttatctgtctttatgatttcatgattagacaatgtggaattacataacaggcattgcactaaaagtgatgtgatttatgcatttatgcatgagaactaaatagatttttagattcctacttaaacaaaaactttccatgacagtagcatactgatgagacaacacacacacacacaaaacaacagcaacaacaacagaacaacaacaaagcatgctcagtattgagacactgtcaagattaagttataccagcaaaagtgcagtagtgtcacttttttcctgtcaatatatagagacttctaaatcataatcatccttttttaaaaaaaagaattttaaaaaagatggatttgacacactcaccatttaatcatttccagcaaaatatatgtttggctgaaattatgtcaaatggatgtaatatagggtttgtttgctgcttttgatggctatgttttggagagagcaatcttgctgtgaaacagtgtggatgtaaattttataaggctgactcttactaaccaccatttcccctgtggtttgttatcagtacaattctttgttgcttaatctagagctatgcacaccaaattgctgagatgtttagtagctgataaagaaaccttttaaaaaaataatataaatgaatgaaatataaactgtgagataaatatcattatagcatgtaatattaaattcctcctgtctcctctgtcagtttgtgaagtgattgacattttgtagctagtttaaaattattaaaaattatagactccagatgatctgctttaatttcttcatggactcgtctgattttgcactcacacgagaagagaaagcctggctaccctatcccagctactaaaagccagttctgtgcaccgaggacagtgtgggggaaaatagaagatttaagcatgattccagtggcaactgacaacttggcttgattctcataacctgctccagaattactttgtgaattcagtgttgactaagggagaaaatgtagttatccagaacacatagaaagaaaaatttataggaaaaaaatctatggtacccaggcatggccctacatagattcaggtatatctggtgtctgtcaactccaatcttccttcctttccacaaaatccccaccatctaaaattgagggcttcactaccacaccaccactgactccatgtttttttaaacagctttactgactcactataaaattcatccatttaaatatataattaatttcttttgtatattcactgaggtagcaatctaattttagaacatctttatcactgccgccaaaataccccatacctattagcaatcactcccatctcacttctcccagccctagggaattactggtttactagttatctctatagatttgcctatacatttcatataaatggcatcatacaatgtgtggtcttcgggaactggcttctttcacttaatataatgttttcaaggttcctccatgttgtatcacagatcagtacttcattcttttttaaggccaaataatattctattgtatgcatagatactattttgtttatccatgtatcaggttatgaatatttgcattgtttctgctttttgacttttttttttttttttttttgagacagaatcttgctctgtcgctcaggttggagtgcagtggcatgatctcggctcactacaacctctaccttccggttcaagtgcttatccttcctcagcctcccaagtagctgggattacaggcgcctgtcaccacgcccagcttttttttttttttttttttttttttttttgtatttttagtagagagtaggtttcaccatgttgtccaggctggtctcaaactcctgacctcaggtgatccacctgccttggcctcccaaagtgctaggattacaggcatgagccaccacgcctggccactttttgactattatgaataatgctgctatgaacattgatgtaaaagtttttgtgtagacataagattttttattcacttgccccacagttttaccaacatcattgcctgtcccaccacaaccaccactaacacctccaccgccatcacctccaccatcactatccctactcctactaacaccaccactgcctcaattatcaccaccttaccttttccactggctctaccacctccacaccatcttaaccagcatgcccattacctccacctttattaccaccaccattataatcaccatcatcacctccatcaccaccaccgctcccactgccaccatcaccaccaccacctgaccatccatctcctctgccaacatcatcatcatcacttccatcacctctgccacctcctccacctctctctatgtccacatagtagcaatgcagatacattcatcctggttgccttggttggctgtcagataattttatccataaaagcatctctggaggtttggtgagagcaattaaggagcaagaacagtgatgacagtaaatatgagtagttctttaaccttttcacaagcctgagaacaggctctataagtagccagtggcttttggaagttattctaaggcacaatagtaacaacaaacttattccttaaaattaaggtagtagaaaggatgctagaagatgggaaaagtgaataaatttactgcatacgtcaaagctgccaaggggtcaaatatgggccacatttgaaaattctgttccaaactccatctgttcttagccagatgagtgagtgtgtttccacatcatttgagtaattaaaacctctcactggatacattaaaagtaagatacaggcattttgctttaaagcctgtcacattattttttctgaagcatatttcttttgatgattgaggttatccagccaccacttgtatgcagtcatctccgttaggctaaagggagacctatgcctcagggatgaatcagctctgggtaatgcgccaactcagaaagtacattagaaatgaaatgattagggcaatgtggaacactgtgaaagctcaatcttctacctccctcctacttggcactggcagaggacccttctacaaaagaccagaaggtgaagggtggccccagatcccagtaacagagtccttttctcttgtcggactctcatttctatttctgttacccttcttccacatcctcctccagcctctgctttcaccaactttccccaatctctgtgtcactaattcattaataaactgatgattgcattgaaaaagaaaagaaaatccgtattttgtgatcatctatctagtacatgccaggcattgtgctaagtgcttcatttatgttgactcattaaactcttaaaaaaaaaaagcttggcaatttggcaaaaccagcattattagccccattttgcggatgaagaaattgatagtttatttgaacaagctctctcagctaataagtgatgtagtgtgatttaagccagatgtgtgtgactttgaagttttagagagtcctgaaatatacatttcagaaatgcacctttgtcaattcagccagccaagaaactcctggagacaattgcctccacaaggagaagcaaagaaagatggactagatgtcatagcagaaggtccttgtgaacataccttttattcactcattcattcaataaatatttactgagcttccattatatatcaagccctgttctgagtattggaaaaacagcactaggagaaacaaaaagcaaacagacaaagcagggaaaattccttgcattaactgaacttacactcaagctagggacagagagattaacaatatataaaggatatggaatggtaaatgttgtagagaaatgcaacacaatgaagggggtacagagcataagaggtaggacagagggtgtatcttagtccacttgtgctgctataaccaaataccacagactgggtaattcataaataaaagaaatttatttctcgcagttctgaagactgggaagtccaagatcgagttatcagcaaatttgatgtctggtaagggctgctctctgtgcttcaaagatggtgccttattgctgcatcctctggaggggaaaaactgtgtcctcacatggaggaaggtagaaggacaaaagggactaagctagttctctccagccctgttaaaaggcattaattcattcatgagagtgaagttctcatgacataatcactccccaaaagcccctatttcttaataccaccacaatggggtttaagtttcaacacatgaattttggaggtgacacattcaattcatagccaggtgttactgtaaaatagaatggtcagggaagacctcaccaataaagtgaagtttagtcagggaattcttcaaggtttagagtaattaaaatacatccagagtgacccactggagaagcagaggctgaaagtgatgaaatgaaagtacaaattgcctctatcttatcatttaataatagtggagtacctcctctgtgaatcagtactcgtgttaagtatttcctacatatgctagaagaaagttgcaaacccttggcccagtgagcaaggaagcaagttcagataatgagacaagtggtatgcaagcaatgaatgtcaagtcaaattttcttagaagagtagaaggtgttgacctcatggtccaagatttaggtcttcatacaatcatccacttactaatttaccttcaaacatgtttgttgtgtacctacctcaggttctttaagttttggatactcaagtctgtctcttagaatgtagggaacaagaaaacaaagaaaagtgaaccattgtcaaggcatttaactgtagtacctgcagctatctcctggatgagttgccaacactctcagttgtctcactgttctggaggagcaatcccaggcaggatgcctccagctggtattcaccacccaccattacacaatccttggctcctctagcctcttgccataacatagcttcaagaccattctattcagggggttgactgccttgagtttatgatcctatctccataaagaaatcagaaaaatttggcccataatcctcctaccagaccctgctgatgccttgcccacatcctccaagcacacacctctgttcataaaaggctgtttgcagtgaagaatcatgtaattctctgccttgcggcagggatagccagaacgctgaagttttaatggccttgcaagcagtcatcaagaatggatgaggatggatgagtggataccccagcttctttggccctaggttgggataactccaaggtgtgtgttctgcattgtctcccagagttccccagctgaatcaatctctaattgctcatgtgataactcacctgatacttatcaaccactttactggctatctgcttttctctgtctctttcccacctttcctacttgttttttttctggaatctcttctcaaataaactacttgcccagaaaaccttgtctcatggtctgctcttcagagagtcctactaaggcaacaccttcacaagattcaggccagctcctaagcatcttccccaaaacactgctacagagaaatgtgctgccttccatctgcttcaaagcattttttggatccatcattattcagtgaaatgccccttggcattctttggtgctgagcaagaagctgcatgcaaagcaataccaaaacgattgcctaaacctactgcccttcaccatgaaacttagcctttgtcctcaagcatcactacaccctccccaaacaagggttggagaaatgaaagtttatagtaaaaggcaatgttctgcctcccacaaaattgcacactaaagggtagcatggacatgctgtggaaagagaattcaatcaggagtcttgattaagacttctctgagttttagtctatggataagcaaaatggacatcacgatgcttgccttactgattccacagggtggttgggaatatcaacgaggataatgttcattaaattgccttgtaaatcttccataccactaagatgatgattaaggtgaaaggaaacaaaatcagcaccatcagggtcagaaacaggcctctcttgctacttttaattagaaaattcacttatcacatgcatgtgcataggttgtactcactggacttcatcttaggtttaagtaaattaatttcacatcaactatgtttcatacctttgtcaggtctaccaataaactgcccaagtatctccatgttcccaattgtagcagtgggggtactgaatttttcaccattaaaattcagtctctgaccattacccaaaagtcatcaaggtcaagggcattaatactgttttctctattgttcatgtgcagaaaataggaatacttccccaaatgttactatgagcccaaacgacttttacgctccacagttctatcttactgttacctattgttatcatttttgccagtactgttaatgataataagggaaaccaggcaaaatattcaaggaatatggtggaggctatgaacttctgtcatcagttagctactactatgtaacaaactgccccaaaacacagtgtcttaaaataataaatatttatttagcttgcaattctgcagtttggcatttggggataagcttggctggcagttcttccagtctctgctgggctcctcatgtgactgtggtcagctacagcccactgggtagctcagcttctgggagttggccagctattggctgaggcttcttctctatgaagtctctcattctccagcagggagccaaggtttgttctcatgacaaagtcaggagtccaaaaaaagagattggaagcatgcaacttatcttgagggctaagattttcacctctgccacatcctattggccaaagcaagtcacaagacctgtccagatccaagaaatagagaaatatgctctgcctcttgttgaaaaattcttcagtctcattgcaaagagtgtgcatacagagattggtgaatagtatgcctgtctttgcaatcaatctactacaacctcaaagaggtgtatggaattcttctctcctctttgaccctagacacttatgaaaacaaaaagttaaggtgaactctctgtgtttgttagagtgggcacatgccagtatccttcccctttaatggtattcaaaagaaaaatcacggggctcagtggtccagcagcccaacggaggatttgagaaccatgagcagagtgattgtagctagggctgagggtggctgctgacagcctcttgataagactgaccttaatcctgaaacaacaaaactaatccctcgtattcaaagcaatagggtttcagccacatcattaacccctaaatacccagaacttgaaagaaaacatttcaaaatgtacaaataaaactggatcctcaattagcacttgacaaatacccttattctggacaattctgtgtttattttcctttctatcttttatttgttgctattttgtggaaatttgcgctgaaatttagggaggaaaggggtctttcttttattttcctttcctccccaccttttctgtacaaaaatacagtgttctctttactaaggggacaaaaaggactgattactcagggttgaaaaagaaattatgtgtgtcagagacaacttaagtatacacaagatatatcctgggtgtctgggggtgtggggtgtgggaagtggctgctatcttccgaggaactgttgtacttctttaaaggaaccgtgacaactgccagtttaggaaagatgaggcaagtgctaatggtatgtgtttttaaacatccagaggctgtggagatagaaagccctagagacctaaatctgtactttcatttgttattaaaggcaaaactccaaactagaccaaacagactctccaaggggctagagcttttataccactccactaaaaattcactttgttttcaatgcagattgatttgaccacgacaatgccctatttaaatttctactctcagggctttcatttatatacattaaatgcaaataacctactcagcgctgaaaataattaacagttctttagtcaagatagctcttccaactatctcaacataattttattccagagcaatgatttcaaaccaagaagaaactttggagtaccttggaagtgcttttctcaagttaggggatgttacaggttgcttccttaggaaacaaagcctgaaatagaggaataagtttaagtagtttatctggaactgtgactccagggagcaggaatgagggatgaagaagtgaatggtgaaaaaagtcattggaaagccaatggaggcatgagttatggagttagccacctgcacgtttgattctgtgagacagctgggaagcctaggaaatgcatattaggaccatctgcctgggacaagaaagggagctgcatttgcccctcaactcccaactctttctggtcaaggattgccacactttgttttccacaattatcaatttgattgtgacaatggcccacgtaaatttctactctcagaaccttcatttatataccttaaagattaccacagggcagggtgtttacttccctgttctgggttgtgtgcatggatgacaacgggttatttgcaagaatgtcctgcaccagaggactagaaaaattccagggcagaagggaggggtggggctgcagtggggacagtcagctcacacttccgtaaggctggttggaccctgtatgaaactgattgccactgttgtgggtcgaataagagacagggacaagaaaattagaaggcgtgtttaagaagcatctactgtgggagggaaaagagggagagaccacacaagcagggcacctacccagggtactgcatctcattgttcaggttgcatacagtaacagcagctccacattcgcctgttccatatatagggtttcatcgaagattttgtttgaaagcattcactgttaaaaaagaagaggcaaaaaaaaaagagagagagagagagaaagaaatctttaaaagcctctgttctagaataatttagaggacaaataagatgaactcaagagtagatggaaatattaatatataaatattctaaatattggtagtagatctaaggttttggatgacagataataatatcaggaaaggtgttttttggtttgtttttggttttgtttcttttaatcctaaagacccagaggcaatgaaccagatagtttagcatgaagaggaagaaaaggaaaaggaacaccaaagaagatagagtcaagcaattttgacaaaatggtaacacggaagagaatgaggagaactgccattattagttaaaaaagaacaagagttcgagatcagcctggccaacacggtaaaaccctgtctctacaaaagatacaaagcttatccgggtgtggtggccggtgcctatagtcctagctactcgggaggcagaggcaggagaatcgcttgaagccgggaggcagaggttgcagtgagccgagatggcaccactgcactccagcctggagcaagactctgtccaaaaaaaaaaaggaactagagaaaaaagtataaaaagaagcttttaaataacaatggtttctgaaggattggaggacagaggctgtttacaaactcagctctcccttgcctcttcaggctatttctagttcatcttcccgaaataacctgttccttgtttgctctctctttctttattctcacagccatcaccaagttgcccttgagtacaccctcctacaccacaaagctgttctcatcctgggtctcagctcatccaacactgctccaaagttcagcaatcttaaactccatatatgtcattctctaaccaaaatagtcataccttcactctctcatgttctttcttatgtctttgcacttgcccttcaaactaacctaaacttctaatgtctgcttctaagttttctctcaatgaccccaatttccaatcctgccaagagctccagtgtgtgacagcctccactcttgggtcacatcttccctgttttgcccttcaatcctggactataaatcccaaactctggatcaatagagttctctgcctgacccctccttaggcctggggtccttgggaacacaggaaaatcctggactggtaccacggaaaatgtatgatcccattgaagttctcacgcccagcaggtggcagtgtaaactggtataaccactttagaaaaccatttggctgtatgtactaaagctgtatgcatacactgacttggcaattccattcttaagtatctattaaacagaaatacagtggtccttttgtataggcaagggattagttctaggacttctgcttctacccaaatctgtgtatactcaagtcttgaagtcagtcctgtgaaacctgagtatagaaaaagccagccctttgtatccttgagctttgcatcatatgaacactgtattttccatccccatttggttgaaaataatccacatgtaagtggatctgtgcagttcaaacccaggttgttcaagggtcaactgtatatacttttgttcacccaaagacaggtactagaatgtttgtagctcaaactggcatttatccacatgcccatcaacaatagaatgaagacataaattttggttgttttcacatagaacacctacagtaaagagaataagtaaactacaactacatgctgaagcaacatacgtaagtcttattatctcaatataggatggaagaagccaaatacaaaagagagcacgttgttccattccatgtgtataaagttcagaaacaggataaatgagtccatagtgttagaagctagaatagtggtaatccttgggggaaatggttagtgactaaagatgcaagggaagcttctgggatgctagtaatcctgcttcttgatataggcgctggttacatgggcgtgttcagttagtgaaagtttactgatctgtgtaatatgttacatgtgcacttttctgtatgtatgttatatctcaacaaggaagttcaaaatagttaccaaaatgacaaatatatatatataggcataggttacataattgcttcccaatgtgaaaaatgctccctgcagtagtacagcaccacggtctgcaattataaggcataaaccactttcatttcctgtccctccagtttcaaaatgtcccttcccatctatgctgtactgccttcctgtatcagtcaggctcttagaatgcctgggtaatgtaacaggactttaataacagcgactctttataaaggtgtgggcaggtttagagaaaccaaggaggagagtgcagtcccttgggactagcaacagtgggggcccttcccatccctagtcccaaagaggcaaggaaagggagctgtttccctgagcctagaaaaggtagttttccatggagaggacaccgtctggctggagctgtggcctttggtgaagggatggagccaacctagggcaacgtggagagagaaaactgaaaataaataccagtatccctctactcctgccgtctgatttcttgcctttctgatggctcccaagggccaaagcctaccagaagctagtggatgggagtcagtaatgaggtccacacaaattggcacttccaagacccagaacagggtggaaaagggtagagtgttggtttggagcaatgagtgagggcttcaaacacattccctctccataggtatctttctccagtcacactgactctactgaggctgttgtagctgcatgaaacagtcttactaaacgtccctcaagcaaaaggaagcttgtggtgaaggtcacacagaagaattgaaattagagagtcatggagtcttctcttcctcttgcttaacggctatgtggtacttccacttctatctgtttgtctttatattctcaccagtttggctacctcataatgttggctaaagagaaccaaccatgttttctccatttacttttttcatctcaacctttcagcttctgctttcattgcttttctccctcattcttgagatgttttctactgaaattcccacagaaaggaatccagttagttcccccgcttaggttcacaacaggcaacatcataggttgctgagcagcctatgtttggattggctgagctcagtcatgtgctcacctttggtccaatgagctattgatggagaagttggtcatgtgacacaaaacatggctacctaagtagcaggagctgtagttgggagaatgggtgcagtgagtgagtacctgttgatatgtacgtaatcgtcttaaatcactagtgtctaaaatatttcctttttggtttagatgctctcaaaacagagactgacatatgctcttggattcaggtagtttatttaagaggtgatctcagagagccagagtaagagatcttttaagaaagaaaggccaccgtaagcattgttgtcaaggtcaccactctgggcaatggggctcaattccatgggacctctgagaagtgtacagaatgcctctcagtattggccacccaaaagatgggtggcaggagcatttattaatcagctttcatccctgtacctaaagggttatttctagaggtattaatttccccacactgccacgcttgcatccacagggtcgagcaaactctcattgatgcccatagcattgaagaagccctgagacaaaaaggaaaacccaaggtacacactaaaggcaagatgcctcctgcttgaagtgagtcaaagcctgcacagaattgtctacccatccatggctaaagtcagtgctaagaccaagaaaccatggatagttcaaatatcatgcagcagttaataaccattgtggttttcatttcttgactctcagttttcctgtccattctctacagtctatcttccatccttcttgacctttatgaaaccctcactcaggtcaccataaaattcatcatactttctgggcacaaaacaaagaagtaaaatttttcaatcctcagctactctggtctcctgggatatttgatattgttaacctccaacttaaaaaaaaactctttcatctgtttttgcaaaactgctttcccctgggtcgtctctggctgctctttgtcaatctccttcggtttttcttcctctgcacatattttaggtgtctgcatttccctaagatactaaattgggtttgcttctcaaagtatacaaacccaaccttgcctataatagcttcagctactacctttatgcaaatgattcccaaacctagatgcctgctgcaggctcctcttctgaggcccaaaaccacatttctgcctgcctactaaacacctccttctagctcacccacaggcacttcaaactcatcatgaaccaccatgacatgctcaccaccgcccccttctaaacttctctgccttgggactgaagccaggaaccaccccctcattaaatcagtcaccgcgtcttgtctatgccacctccgaatatctctttcctctgccccctcctttcccatggccatatctgggagagcacacactcagtatgagcctacccagttcctgcttgggtctcacttcacccttcataccactcccagaccatggttaaaaaaccatcagtctgatcagtttatgcctcttcaatcctccaatagttacctttaagatgaagtgaaaattctagcactatgtatgaagctattcctgatccagtggctgccaccaattaggactcatccattactattgctctccaatttactaagatagttgcagtatctgaaaggatgtgcttttcccaccccaccttggcaaatacctgctcatcttggggactttattcaggcaactgaagtgttcaacttcccaaggcagatttaaacactcccatttcactcttctcagagcaccctatacaatcttcaagtataatatttattatatgttgctttgcaaattttttcattatgtttgtctcttttatgacactgtaaacttgtgtctgttcctattgctgcataacaagtaatcatgaaatctcagtggcctacaacaataagtattaatgtctcacacttcttcagtatatatctgagctgggctcagctaagcagttctacccgtctctgctggaatcatttatgcacctatgggtcagctgagtttctgtctaggctgggctaggtttgggcagcttagctgggttagctctgcatcattcatctctcatccttgaaggcagggatttttgtctcattcctcatagtgttgaattgttgaatcaaagagcccaatgagatagctagttaacaatgtatatattaaacagaaaattctaagttaaattgtgtcccccacattttccaaactcttccctcatccatgcctacgaaagcagaataccctctcactcatcttcataaatatgactttttcactatttcaatgagtgtgatatataagacttccatgttttttgcaacctcccagcagaacattcaaataccaggtggtatttttatccacagggtaacaatgacttgtttgccttgtgtgaagctatttgaaaaaaagacagttgggtggtttaaaatatgtctacaaattattcaacactcccttcaaaaggtgaggcctaattctcttcccctcaggtatgagcttagtgactcacttctatggactagaataaggcagaggtgacaatgtgtaacttctgaaactaggttatcagaggcctgtggcttcctcctttctttctcttggatcacttacattggaagaagccaagttgttgtgtcatacaaataactcaagcaaccctctaaggaggtctatgtgacaaggaactgaggacttcagccaatagccatgtgatctgcttctaggaagcagatcctccagccccttctgaagatggcagccccaaccaacatattgactgcagtctcatcagagaccctgagccaaaaccacccagctatgctgctcttgcatcctgattctcagaaactttgtgaggtcacaaatgtttgttgtttggggctgctgagtttggggataatttgtacgtagcaatagataactttcagccactttgtgaacaagctattaaaccctcccctaaagcccagctttcgtaattacaacattgtggtggcttctaaacagcacaaagggtagaaaataggctgtcaccaccacctccatgttagaatccctctatctgttgtctaaaaaaataacaaagcaattacctaccttcatttgaggctaataaaaaacgtcagattttaggagggagtgtcaaagttgactgcaaatgttggccaggaattgtgtgtgtcagaggaagaattgaaaagactcaagatcatccctttgactgaagcccaatctttaattttcaaatgctacattcagcctctacctcctcagagaaaccagattattagaccactaacctgacatctagtttattgaaatgtcacttggtctgtgctctgcaccttggccctaagaaataaaacactgcaggccaaatcctggtctagcccgagggtgataatgagggaaatcatgcggctcctaaaaataatgacaaaagggagcagcatcagaggtggtgagtcactgttgtttgggaggcaggataaggagagcagagagaggaggagattgtaaaaaaagatgagcagaaaataaacatgggtgctgcagacatgaaactgaagggagcaccccaggcccccggccccaaaaagctctagagcaggttgagctggagggctggacagtcagggagaaagctgcccactcctggcttagcctggggagctgccacccacccatgtagggtgatttgtcaggtccccaaatctctcctttaaccactggaccataacatctatgtccccatgatggcagaaaacaaatacagaaaagacacttttacctggcatgatgccaagcccgggggctaggaaaatgaataggaccctggggatttagaatttaacaaggagattgacctaggaagagtcatatacaaaagaatggagcaaaagcaatgacagaggatcgcataaggaattatgggagacagaggagggctgtctattcagacccaagcctggaggtggtgaaaggagaaatctgggaggctacctggaggaggcagcatatgagctacaaagaattatgctgatgaaatatgtgttgtgggagagagtgggggtcctgagtaattccaggaagaggtaaatcacaaccgtattagtttcctatggctgctgtaacaaattcccacaaaacaggtggcttaaaacaaaagacatttagtctcttgctgttctagacaccagaaatctgaaattaaggtgctgatagagtcacgctccctaaagaggctagggtctaggggataatccattcttgcctcttccaacttcaggtagctgccagcagtccctgacttgtggccgtaccattccaatctctgtctccctcttcccctcacctcttctatgtgtcagctttcccactgcctctgtctttttttgctgttgtttagttttgttttgagacagagtctcactctgtttcccaggctggagtgcagtagcgtgatccctcccagctcactgcaacatctgcctcccgggttcaagcaattctcatgcctcagcctcccaagtagctgggattacaggtgtgcactaccacgttcagctaatttttgtaattttagcagaggctgggttttgctatgttgaccaggctggtcttgaactgacctcaagtgatccgcccaccttggcctcccaaaatgctgggattactgcagtgagccactgtgtccggccctgcttctatcttacaaacacattaggattgcatttagggcccagataatccaagaacatctctccatctgaagatcatttacaatgacatcttaaaggacccatttttcctgtgaagtaacattaacagtttccacggattgggacctagtatcttgtggtggccattattcagcacagtagaacaagctaagacacagacatgcggatgccctggtgagtggacattttgactttcctcaagcttaagtagaggtgagagatgaggtgggctgatcaccaaaacatgaagaatcttacaaaccaggatggggaatttggactttacctggagggcaatagagcatccttacagattttaagtgagagtgaaagggccagcctctcttgactagagattcccctggctgcagtgtggggtagggcaggagagggcaaaccctccagtgtggagagggcaggacattcgatcttaaactgggacttgtctttagaagaccacgaataaaatacaggtgtatgaccccggagggagagtgtcaaggacctccttggagtcaccaggtcagattttgtcagcaagtgacatcgctgtttgttgtggaacagagattgaggccctaaatggaccttacaagtgtacaaatagtgcctagaatatgtgtgtgatacatgcttgccaaataaaagagaagaaagaaaagagggttttacaaagactgtgagaatcaggggggaaatgggggaaagtcaggaggggtcccctggcctacaaggtcctcatgaaggcacctgtgccaaagggagccacatcaccctggagatgatgccaccccgcccccccgaacaacctacagcagtgactggcagtggggcgctgaaggctgcccccttgactcacggtggcacagctctgctgctgttcttgttccagagctccctgtggggtcaggctgaggctacaactgagcccatatcctcatttttctcctgcccctgccctgtcttgtgttcctcatcccatttcagatttcttctgagagcactccctaaataaatcacttacacaagaacctcccgtctcaggctctgctctaggaaaaccgatctcagtcggcctccatttctggtaatgtggctcttgggacagtctcggctaagagacagacagcaagcagaggctcaaaccagttgtcaacaagttccaggaaaacacttaattccacacatgctaaagtgaggggagaaggttttatcaacaaaactgatattcaagaagtttccaaaaatcagatggtctgcactaagtagagtgtttatttccccagaactgatttctaattaaagactattcctttggcacttatatcactcttctttgtactgaaaacttatgcttttgttacacattttgttttcactgattaaattcttaagtctttatggatgagactccacgttgggtttctttatttccccataatgcttatcccaatagctggcattcagtaaggattcagtacaggctcaaagctcacaccctcttgattttgtagactttacagagtgcttcacatactcaaagcatggaccatggaccagtagcttcagcatccatcaacttggtagaaatgcagaatttcagcctccaccccagatctactgagtgagaatctctgaggtggagcccagcagtctgtgttataacaagatctctgggtaattttatgagcagtaacgtttgaaaaccactgacatatatgatccctttcaacttttgggagatgaattgattggagaaagtagagccaaaaaaataggacagcggccaggtgcggtggctcacacctgtaatcccagcactttgggagaccgaggccagcggatcacgaggtcaggagatcgagaccatcctggctaacacagtgaaaccctgtctctactaaaaatacaaaaacttagctggacgtggtgggacgtgcctgtagtcccaactacttgagagcctgaggcaggagaattgcttgaacctgggaggcagagattgcagtgagccgagatcgcgccactgtactacagcctgggtgtcagagcgagactctatctcaaaaaaaaaaaaaaaaaggacagcaacaggaatggaatctacccccaacaaacatgtctcctaccatgtgcatggcatgggtgtgccaggttaggcttcaggtgccccaccccattactaggactcagaccccaagttcaacattggttggcttggacaaactatctccttcagtttctgttttctcatcaccgaatgaaaacaaccttagtacttaccaattcacaatggctaaataaattatgatatagccatacaaaggaatactatgcaaccttaaaaataagtaagcttatatctgctgttacaaaaagatgctcaatttctatttttatataatgcaagattctgaggagtaaattgtgtatatttatgtgtgtgtgtgttgggtgaaaaataaaggactccaaaaatgttttaaataaagatctcattacatatatacatatattatacattatacacaaatactgcaaatatatcacatatatgtgtgttccacatatacattacatatgagagtgaagttaaaggaatcatggcaggcatggtggctcatgcctataatcccagactttgggaggctgaggtgagagaagcatttgagcccaggagttcaagaccagcctgggcaacatagtgagacctcatctctacagaaaaatcaaaaaattaaccaggcatggtggtgtgtgcctgtagttctagctactcaggagactgaggtgggaggatcacttgagcccgggaggttgaggctgcagtgagctgtgattgcaccaccgcactccagtttaagtgacagggtcaaaaaacacacacacatgcacacacacacacagagaaagaaaaaggaatcactaacattcacatgaacacattgcatgtgtgttatttgtgtgaatgcatgtacaggtataagggttctccacttttaaccttatatatgacgcagccacagagcactgacaatatgctgagctctgggcaaggtgctggaaatatcagtgaaagtaagaaaatcacaatcttgtctaagaggaacttacattctaactaggaaggcagccaacgaagaagcaaataaataataggataattacagatcgtgattaatgttatgaaagaaatcatctagatggtatgactgcaacttggagggttcattaggtagaggacagagaagctttccaggaggaggtaatgtttcagcaaagattgaagcaagaaaatcagccagtgattggcagtgctggggaaagggcattccaagtggagggagcagcacggacaaaggcttggagatgggaaggaagttatcttgctaagggaaaaaagcaggtcagtggaacaggagcctaggaagaggctggggcagtgtagtgagtttggctaaggaaagacaccgtgtgagccttgagaactgctaagcattggcttttttttttttttttttttttttaacagaatcttgctctatttcccaggctggagtgcagtggcatgatctcggctcactgaaacctccacctcctgggttcaagcaattctcctgactcagcctcccaagtagctagcattaggggcccgccaccatgcccggctaattttttcatttttagtagagatggggtttcaccattttggccagtctggtcttgaacttttgacctcaagtgatctgcccacctcagcctcccaaaatgccaggattacaagcgtgagtcactgcgcccagcctaagtattggcttttattctaagaggaaggagcacccagcaaagggtttatccagaggactgacaccatctgatttatgtttctaaaagattcccaggttgctgagtgggcaaagtcttgcgggaaagtgtgaaggaaaaaggacattgcagaaatccaggtgaaatatggtacagctgtcagggtggcagccatggagttagagcaaagtgggcaaacttgggaattacatgggcgataaagccaaatttttttatttgagacagagtcttgctctgtcacccaggctggagtgcagtggcatgatcttggctcactgcaacctccacctcccaggttcaagcaagtctcatgcctcagcctcttgagcagctggaattacaggcacgcaccactacacctggctgatttttgtaattttagtagagacagggtttcaccatgttgcccaggttggtctcgaactcctggcctcaaatgatctgcctgccttggcctcccaaagtgctgggattacaggagtgagccaccatgcccagccctaaaaccagaatttgacaatgaaatggaaggtaaagtattggtctcggagtcctttggctgtgagttgctcctagactgttcttacctgggacaaatggaacaactcagccctgccccacatccctctcattctccagcaggatggcctgggcacttgctcatggctgcagcagaggagcaaaccccactgcaaaagaacaagctttttctcaagcttctgcttgagtcacagctgccgacatcccattggccaaagcaaatcacacagatgatatcggaaccaaagggcaaggaaataggctccatctcttgatgagaggagctgcagaggctcctgactaagcgcaacgacacaggaaaggctgaggaatgaggagacagtgtttttcaaagaactcaaagaaccagaagctctctaccaacagccaggggcaggagaccactgaggttagcacagttgtggaatgttgaaaatgataagtgcctatcactatcagtgacatcagtcagtttaggatttgtcaataaagtggtaagtgccaggccatgaaatgccccagggccctaggatatgccaaaattagggattctctgctctttggacagtttgtgttatcacaacaaaacaaactgcaggtcagcctgagagtggcaagtgctttctttttttttgagacgagtcttgctccgtcgcccaggctggagtgcagtggctccatctcggctcactgcaagctccgcctcctgggtccacgccattctcctgcctcggcctcccgagtagctgggactacaggcgcccgccactgcgcccggctaattttttgtatttttagtagaaacggggtttccccgtgttccccaggatggtctcgatctcctgacctcatgatccccccgcctcggcctcccaaagtgctgggattacaagcttgagccaccgtgcccggccggcaagtgctttcattttctctttagctgccctcaaatgcaatgagaagtgcttcccattacttaatttcttggtgcctcccctgatttttctgggccccaagctggtatgctgccccaggaagaccataggaatttccctagagaaacaaaaatcctgctactgtttccacacaaaccattcctacagttagatgggggaggggggcgatgtgctggtgccggtggtgctggtgatgatgtgtttccactctatttggttttatgggtttgttcgtttgcttctcgtaagctgtagggcccttgatgaaatcagtcatcatttttgactttatttgggacatgaagggataagcctctccctaatttctagaaacataaatagcaaggaaacagaatattaaacaaacaagggctttagcagaaggtctgcggatgttgcgaggttctctctatcactgcggatctgtggcctgtccccgggatggggcaaaaagacttggggcaccttactcaagtgcagcaaacaaaagtcaaggtctggcaaccccatccgcttccctcaagaaggaaatattgtaaaatagtaatgtcatggcccctggtaatgcagattcccatgggtctctgacttaaccaacatgtccttttacacataaacttggaattgtgatggaggcggggtagacagctggacacactgtcaatgttggcacgtggtacaaatgaaaaggtaccatctgtgctactgctgaaagatgatgatgcatagatgtgactttttaaatgttccatctggatataattaaattgcctccttaaaataaaaaatatccatatttgatatgtatcctttattgtaatgatctccatatatccttcattatttttatagaattcacttcatgagaagtctgacatgaaatattaaaacctaaaaacaaaggtctctggggagatgactgtggtgttattgtttctctggctgacttgttcttgattttcttatgatttcaaaaacaattacaatatgcagaattccataataccctcctgaaaaaatacctttactggaaaactggatagacaggtagaaagagaaagtctgttatctacgcatgggaagaagacaggatgtgaatttgccagaatatccagttgcctacatttctaaaccaagaaaagctgcaattaattttcttccctaaaaaccatgttggttccaaagaacgttctgagaataataataagggtaattataatcacaacttgaattcagagtgacttgcttctgaagcattaaaagcataagagagaacaaaatacatggaggggactctaacaggcctctctccagtacaattatagatttcaaatctgttgttaccttaccatggcaaccttcatacttaatttcacaaatgttgaacttttgtcaccctatttctttgggggagtccttcaactactgcgttcactgaattcatgtcatgtcattgcctttgatacttaacattcctccaagtacatgctgtgagctcacatccccagaccaaaaacaacagcgaagactaggaagaattcggctgtgcccttggcaatagcacttagttgtgttctttctggctgatgagaaccaacaacagaacataactccaaaaattaagtgtcaagtttaaaagcaaaactttggccttcaatattaataaataatcattaaatatctactgcgtgttgaaagatacgggaaatacaaaggttaaaataagccatattgttccatctcacgacatttacaatatagaaggagaattagatccaaatcactataaagcagttcccaatgtgtgatatccccaaaccagcagcatcacctgggatcctatgagaaatgcagattctcaggctccaccccgccagaccttgtaaatcagggtctctgggagtagggcacagcaatctgtgttttcagaattcatccaggtgattctgatactctccaaattttgagaatcactgctgtgaagcaatagaacacaaatgccataagacagacacaaaatgcttgaagtaaagggaaaataacatccattttagaaagaggacttcctggaatgacaatatttccatgcagctttgtgagtttgctaagaaattgaaatgtaggaagtggatggagtaagagaacattctggatgagtgaaacatgagccaagcaacagagttaagaaagtagaaggcaaattgaagagtctagactgactggcatgtaaggagacagagatcaaggtcagaagataggttggggtctcaagagccaggctgaggagggagttatctagctcagtggacaatcatatgttattcaggtcttcaattagaggagtaacaagattagagcagggttcttggaagtttcatctcaaggtttccatagagtaacctggaaaagaggaggatacacaagggttggggaacaactgagttgacagttgcaatagtttgggtaggtaataatgaaagtccctactagggagtttgcagaggaaatataaaaatgaggaaaataattggagatgtttcaaaggactacattagtagggtttagtaactgattcaatattaaaagggaaagaatgggaaaatcaacaccttcattagaaacaaattagtcatgtcataaaccaaagaagaaggagattaggaggaattggttgtggggagatttgtttaggacacagttgatggtctgtggtatggtgtataccacagctagaatataggcatagagtttataataataataactgtaaaatttggccacataggccatgactggttctaagctagatacatgacctgtatgtatcttgtaaaccttatactgactttacgagcaaggcattattatactcttttttttttcctttaagagacagggtcttgctctgtctcccaggatggagtgcagtggcacaatcatagctcactataacctcaaactcctgggctcaagcaatccacccacctcagcctccttgagtagctaggactacaggcctgtgctaccatgcccagctaatcttttcattttttgtagagatgaggtctcgctatgttgcccacactggtctctaattgctggcctcaagcgatctttgcaactcagcctctcaaaatgctaggattacaggcatgagccacaatacccaggctgatacctatttgtattagttaaattcgattctgttgcataaaataagaagttcaaaggaagaatggcttaaacacacagggcttattctactacataaaagaaatctggaggttggcaagtttcttctaatgccctgcttcagcatcctccactggtgaatttcatcctcaagggtacttcatgattcaagattgctgctaaagtgccagccatcagggatatgacagctgtgaatatgggaacgggggcttgttgagagacggaatataaaagaataagaggttgaaataaagaaccttggagaatgagcacaaggaacggcctggaaaaggcacagaaaagaggcagagaggaaacttccggcactatgtccacaaaaggcagggaaacacaaagcttcagaatggaaaaaaaggttggtaagtggtgtctaatggtaaagtccatggcaactgaaaaatacatattggattgaagaatgtgaggtccttagtgacctttaaaagaagagcatcattcacgttttctatggcagtggatctcagagttaaggaaatgttaggtagtgaagtagtgaagcattgattcctcttccgtgaagttttgtgatagaaggaaagaaataaatggtggtaaggcttgagtttagcagtattgaggtaatgttttcatagattagaaaacctgaatacactttccctttatgatgtcaagtctctcctgagactagatttaaatcacttgagtgtgtgggctgggacagccaagtgcttcttccataatcagcagctccaatccagtatctcccggggaaagtgaaccaagtgttggctgatattatatcataataaagggctgacattacactttttgaaggctgtctggtaagcttaattaattcgtttttgtttttccctcccaaagctggatggaaactcatgcaactctggcttgagttcttgaagaaaaattatattgcaaaagtgaagatgtttcatggccttctgcactcccccaagggcagcaaaggctctctggctgctttgcaaagctgcagaatctgaaatgtcagggccgtggatccatttcagcaaaaataaatatcagattacaatacattgtttttgcagctgactgaggctttggtgtagtggatatttcattctgcagttgcaaattaagagagaagttgctggcagggcaaagtatggtgtttgcatcatttctttatgaagccattttctcccctcaagcagtgtattcccagaggattttttttcccactccacaaatgcctggtgcttttgcagtgctcagcatgcatgacttgctttgaaagctgttaaaaataaagacagatagttggaccagttctcttggtacctttcattcttttctccataaatttttgccccctccctcccaccctctaccttaggtccctccctggaaacccttgtactacaaaattatgatagaatagcagatactgaaaccatagcatgccttgcatttctaattttctaacctgaaactagtgagccataacaccctggaagcttaaagctgccggaggcaaatccaactcttctgactttagaatagcaacacatcttttaccattttagctattttgaggtagattttcatacacacgaatgcttattgaaattaaatgcattttatttttatcctttctttttccttctggagagatagcagacgtgggggcacttgttttctacctcttagagaataaatttgaatacctaacgtaggtattaagctacctaacagtaagttttctacgtatattgattaaaaccagtccagaaatagacccacacaaatatagtcaacttatctttgacaaagattcaaagacaattcagcagagaaaggatcttcaacaaatggtcctgggacctagataaggacattacacctttcacaaaaattaactcaaaatggatcatagacctaaatgtaaagtgtaaaactataaaaattctacaagaaaacctaggagaaaatctatatgatgtggattagaagatgagtttttagatataatgccaaaagcacatctatgagagaaaaaaaaagttatgtcagattttgttaaaattaaaaacttatctgcaaaagacactgttaaaaaaatgaaagaatggaagaaaagaattgcaaacacttatctgacaaaggatttatatccaaaatataacaaagaattcctaaaactcaataataagaaaaaattggaaactataaagattggaggagccatttggattgtaagagtttttctcgctgtcagaagattcttcaagcaatcactgtgtcaaccaacacagatgtttttctttcttcatataatgaagatcaggaatccaaacttatttgaaaagctgaaaagacaccattaatcccactggaatagcaggttttgcagcaattgttgcacatggattaacaaattgaagatcaggggaaatattaaaatgtcccttcacctgatccacatgtgtatggcagcccaaggctttgtaatgggagcaatgactcctggtatgggctattccctatattgggaattctgggcaaaacctaagccttagaagaagagatgctgtcttggtcttgttggaggagcttgcattagttacacatttcactattgaggttacatgtttatgttgaaaataaattgaatatattcagacaataacgtggtattttgaatactggctgcctttcttgcaggcttgatttgcttggtgaccaaattacccatgactggttcactaactaggtcactcaggcgagtcaagttaacacaaaagaaacatgtcacccaaatggacttgatgatgttaaaatgtccaccttttaaaaatgttaagatgaaatcagttctaaagaagacagtaggccaaccttgaagtgctccctgtttgctgcagattattgcatgctttaatgctatgtaggagtcctatttatcctacttaactcttttttgcctgtcttgtggactggttggctcttttggaactctttcaaaaaagtgcatggagtataacttgtaaagcctcccacaactgaaattgtgtatgtgtgtgtttaaaccaaacctaggctgggcaaagtggctcacacctgtaatcccagcactttgggaggccgaggtaggcggatcacttgaggccaggagtttgagaccagcctggccaacatggcaataccccgtctctaataaaattacaaaaattagtcagatgtgatgctgcatgcccgtaatcccaactattctggaggctgaggcatgagaattgcttgaacccgggaggaggaggtagcagtgagctgagatcatgccactgcactccagcctgggtgacagagtgagactttgtctcaaaaaataaataaataaataataaactaaacttagaaagcttacaacagagctacatagtagtggtatttatttcagattcgcaattatttcttttttttttttttttgagatggagttttgctcattgcttaggttggagtgcaatggcatgatctgggatcactctacttccacctctcgggttcaagtgattctcctgtctcagcttcccaagtagctaggattataggcatgtgccaccatgcccagctaattttgtatttttagtagaggcagggtttcaccatgttggtcaggctggtcttgaactcctgaactcaagtgatccatctggctcagcctcccaaagtgctgggattacaggcatgagccaccacgcctggcctcagaatcacaattctaaacataagaatagcttaattatggattccagttgagctcttttataattgcagaattgtatttttgctgctactgtattagaataatttttaaatgccatcttgaaagagaaatatgtattttaggcactaatgcaaagataaatgaagaacactttaaatgtgtgcattatgtttattttctccataagaatcataaacattaaactaaacaaattacctataatggtaatttagacatacacagggaggagatggccatccccaagccaaagagagaggcctcagaagaaaccaacctgccaacaccttgatcttatgcttccaagcttccaaaattgtgagaaaatttatttctgttgtaagccacagagtcaatggtactctgctatggcagcctcagcaaactaatacagccctttgcctacctgaattttggaagtattgggaggaacccagttgacatttagatgaagtatagaaatacttttttacacaagtttaataaaattgctatcatttatggtgtacttattcaaaattacagtgtggtagctatttatattccaaggtatatagcaaacatatttaatctttaggttaaaaataaagtgtggtgtggaggaaaataccaaattacaagtttttgtgatcaccctctccatttcttcctaagggtaaaagaaatagtatttgtttggtttgtttatcagggtatcgttgtggaaggagagaagacttgaagaattgagaaggtgcaattaatcttcatgagaacaaaaagagaaaagacaggagaaacagaagagctagcacaactggaaactttggagagtacgtgagagagaaaagattcaggaagagctattaggagtggaatatttcggggggatggtatataagaagggttattagaaaggtatgccatgtagaatccattgtgctgttgcctcttccttccatgaaaaattgtcacaagatttccacgttattctctaaggctttagatttatattgctttttctgacattacaaaatgttgaaaagttgtaaaatgaaaacagggagcttaagacagctcagtccatttagtatttttctcttaaaattttccacaatgtgaaacacaaagtaaaatgctgtaagggcaatgattaagcaaagaataaagtttactttttcttccatttgatttctctagctttcaagtgtctgctacttagtccatctgttgttctattatgttgtgtttggcaaacagatgcaggagaagaacactattgccttttctgttttatataaccctagagatacaaacataattttagttgagttttcttttgtagagaaaaattgcaaaggactaaaatacacccaaaaaaattactgtatgttttaaatgaaaatataggcattgtctaatatacccttccaggttacctgattctttggagtctctataccttttattttatttgagttctttacaattctgcaactgaaaaatgcaaatgattcagaattacgcaatcaacactaatttcagaacattttcatcactccaaaagaaacctcatctccattaacagtcaccctcctttccaccttcctctcagcctttctcaaccactgatctactttctgcctctgtggatttgcctattctggacacaactcatataaatggaattatgcaacatatggccttttgtgtctggctcttctgaggcagcataatgttttccaggctcatccatactatagcatgaatgaacactcatccatttttatggcttagggctgcgtggtgttccattgtgtggacataccaccttttgtttgttcatttatcagttgatgaacatttgtgtttcttccacatttcagctattacaaataatgctgctatgaaaaagaaagaaatgcaaatgatgctccacattcgatttttctaaggcactcatggcttctttatcacattcagatagtttttacttgttttcagctcttggttagattatttaagagtcttgagttggtttttaaagtcaaaagaaacactttttcctttccctacctgttcataaaattgaaagaccatagcattgggattgaattgaacctccacaaatatacaagtgaatctgggaggttcagttgattcccccctacccaaacaagtcattttggcaccaattatggaaattcaaattcattttgacatttatggtagcctacatgtatgtcttctcttcaaattgttcttgaactggttgtaacatcttactgtttcctcattaacgagttaaataaaatctttgacgtgtgtccattttctatttgtagaagagttatgagtctatcttttctaaaaactttatccttagcgctttcataaactgactgtctttaagcttttaggagcacagctgaatattagtcatacctgactttcaactggacacaaaaagtgaattactgttttggagtaaggaatagcagggggcggctgtggaacagcagggctgaactgacctctctatacctcagtcaagagtctcaactgtgtacatctccaactaacccagggaacctagctataatctgcatgacatttttatctctgacattcagtttgactttcaagtatcacacagtagaaaaaagaaactcatgaatccaaaatgaaactgaataatatttttccacttggcactacaccatctagtctaatgtgaaaaaaaaatccacttcagtttgctactgcctgctgattagcatgagctcagccgtccttcaaaagttcagcctctcctaaaagcagacacagtcactgctgtgagccaaagggggagagaagaatctcaattcttaaattttcctgagggttattttttgggaaaaatacatttaatgcatggatttcacttactctgaaaagttccttcattcctgttttaaaggtaacatctaagaagtgcccacaacttccagtgagcaaaacacctgccatcttgagatagatgttgccagaaaacagaaaatgttgcaagaggttcgctgtatcagaattagaaacacatgccacatgctttctgctactgccaaacttgaagccacatcctgacatttcagttaaatgctctttccaaggcacctatggcttctttatcacattcagatagtttttacttgttttcagctcttggttagattatttaagagtcttgagttggatttgaaagtcaatagaaatagtttttcctttccctacctgttcataaaattgaaggacaagagcactgggatcaaatctaggcaaatatcttaacagacaatatccaaaatgtaattttcaaaatgtttaaaattatataattctcaattaaatttataatgaatagaaatcaaagttttattagacttaataatgagttaatggtttttttgaaccaaccaagttggttcaaaccaacttgtaggttcaaacttgtaggatacaaagactgacaattatatagtcaatgaaagaaaagaattctgcaataaatcacaaagacgcaaaactgttattgttctactagcaatacaactatatcctttgaggttatcttttctacccagggaaatttgtgtgtatcaccatcaggcaaaaataatccccaccatttctggacaaaaattattgcataacattggtcaaaaattatttataccttatcagtttccagtaaagcaataccatagagttgtaaattgtctgagccctaatcaacagtaaatcgtaaatcaaacaaacttatatatcatgtcaccctagggcaggagtcatccaattacagccttgcttagactctgggtcaaaactagctcaccacctgttttgtaaataaagttttattggaacccagcctcacacatttgtttacatgttttaaatagctgcttttgctgcagagttgaatagttgtggcagagactggatggcccacacagtctaaaatactatctgggctctttacagaaaacaaaatataacaaaaatcttgatgtgttaggacattcttgttttgctataaagaaatacctgagactgggtaatttacaaagaaaataggtttaattggctcacagttttgcaggctgtacaagtatatcgacagcctctgcttggcttctggggaggacctagggagctttcactcacagtggaaggcaaagtggtagcaggcacatcatatggcaagagcaggagcaaggggtaagcgggaggtgccacatacttttaaacaatcagatcttaaaagaagtcactcactattgtgagcagagcaccaagccatgagtaatcttcccccatgacctgagcaccttcccccaggcctcacttccaacactggacaatacacatcaacataagatttggaaggggcacccaaactgtatcaggtgccaacttttgatctgggaacagggcattgtctaacaatggaaacaaagtttctttttttttttttttttttttttttttttttttaccttacgtataagctttgggtaatattttttcttaacaacaatattagtaaaaaaaaaaaaagcatgagattaaaatcagaaaaatgtcttcagggagaaggcacatctgaaataatttaaatcccatgaatatatgactgaaaatttgtgcattgcagccacatgttacaatgaaactagcttaaccgcgctagagatcctcagactctccttcagtatcaattgaaagagaaacactaaattcttcatttgtaggttaatgtttagaaatggtattggagcaagagttttaaaataccagtctagactaatcttgtccatgttacctcttcagaggttatgtatttcccgcagtcactagacatgaccaatgtgaattatagacatttgggggattttgtagactccttagcccccatctgaaaagcagaggtaggcaaaatgtcatattaagcccaattcacaggagtaaatttattattattattattgcattgagacagggtcttgctgtgttgcccacactggcctcagacacctgtgctcaaggctgtcctcctgcctcagccttctaaggaactgcgactataatgatagcagcagcagcctatctggagccactgctgcaaagatgcctgctgcagcgagggaggtgcagccagggctgcatgctccacagagccagcaggagttgggaacaggcaggagccccatccccttccaagctggtggggtgggaaccccacactcctgggcattgctgcagccacccaactatggctgcagacatgggcatccctgtgctctggagggggggtggacctgcgaagcccccctgcccctgcaggcttgaaagtgcccgatcctattgcctggcctccttctcctggctcccagcacctgcttctatttcagagcaaagttgtggctgagactggtcactgtctcaacttggccaggtctgtgtgttcttggggtggcactgacatgccagccccctgccgcttcagtcccctctggactttgagtaccagtgagcacaggagagagtgagggggaattgtgggcagcttggcatgggcctgcaggcacccctctgcatgaacagcctgggtgctgtgggtgccatagatggtaggttgatggtggtaggaggcagagagcctcctgggtggaaaggggcaggaccccagtgaagtcctgccttcaagccagggatagcctgaagactaggggcggggctgccagtttctccgaccagagtgagaacttatggtgctttctccgggcctgcccatcacctcccatggaccaatcagcatgcatttcctcccttctgaagcacataaaaaccccagacacagccagacttgggtagatatccagatgacctggaggcagataggagctacccactctgagtctcctctctgctgagagctgcacacttgtcaggactacctgcctgcagaaaggagcggcccacttagggtctcctgagcactgtactgttacacagtaaagcaccccttgctcaccctccgtttgtcctcgtatctcattcttcctggatgtgggacaagaacttgagacccactgaatggtggggctggaggagctgtaacacaaacagagctgaaacacacccccactgctcaccacatcatggcaaggagaaagagaggagagaagagctgctgcccttctggaagcccagactaagagctcccagaaccagggctatgacacccaatttagggctctgccattcctggtgtctccaagattctgggcaccaacaggttccccagtgcctgcagtggaagccacttgtggtatgcctagttcagccacagcagggagccagcacccatgccaatgcctggagctgcctgccccaccacagcctggctgtgcacagtggctggaccccaggctcactcattcatgcaccccctcactggtccatgcctggcttgcccttggcaggtgtgggatccaggctaggagcaaaagccgaatgcagcctgccaggccaagtgggtggaacaagtccagtgggcccaagcaaaactcaggcaaaggtgccattggccacagatgttcccagctggtgaagtgacactccaaggatcctgagacataagaacataccactgcacctggaagaaagaagcaaattctgacaaagttttatctaggttatacacagggctgagattcagcaagtattcacatcttgttaaaatatgtaatacttaagcaccatttggtaactagccatggctctgagccactcatataatcctcaggttatcccagtaatcccagcctctccctctagaacccccaagatcagtcacctactaaagggttaattctggcatagagcagaaagtcggtatgtagtcaagggttcacatggtgattggttgttgcccacactgtgttgtacactaaatatttttacatttttacccctggctttacagtccccacattcccaaattgttcacagttcctttccagttaagttcctcctggcacccaccagccacatcacaaaatcaatgcaaatctctttaaaaacagcagcagcaaaatagaaggaaagccaggaagaacaagcatagaatgggaaccaatcttaattctacatctaatgctacccaaatgaggaaagattatgcaaacaattctaacaaaaagtgttagattttttttttaattcctaaatattgaagaattgtacagcctaacatagatgaaagaactgaggcatttacacaccaactggaagagggggctccctgtaaggaaaactcataagaaaagcccttaatgaaagaactaagaaaatagaaaaacaacagaagaaagctttggaaaaaaacttctgattttagacttctgcttaacctaacctgggtgcccagaataacttgtccattctgactttatctttatctgactttgcttttatccagctctccccgtcgttgaatgctgtatttgcacacattgaagttcagatgctattggtgccccaccttgtgtcccctgactcctcttcaatgcacatcagtcaaactttcaacagccagccctcgcatttccttccctaagggctttcactgtcccctggatccccctctgccatttgttgtataaatgtctcagtttctttaaccctcaggtagaatattctacaccagctttcagagtattcccagcagaaatgagctccagccattcctaacagcagctgacttgacaaggtacatatcattggctcctttccctttccctgtctcatgtaaccctcaattccagttgcctttatcttctaaataagcccaaaatgttcacctcctaaattacattcaagtctttgtgtcagaatctgttctctggcagaatccaaaataaaacacagtaagaggtcaagaaacagtcattcactcattcaagacaaaaggtatctctactttttggaacttattgaggtttcctttgtaccctattttatatgtgttggtgggcacttggaaagaatgcatatgctctaataaacatatatatatacacacacacaaacacacacacatatgtgtgtgtatatttatgtgtgtatgtatatatatataatcaattttactttaaaattatgttatttagacctttcatatcatttcttatttttcatccaaactattatagaataaaatagaataataaaatattttagaataaaagagttgatttgaagtcctctattattctatagtttctgtcttatgattttttgttgccatgttatttgattgctctgttgcccaggctggagtgtaatggctcaatcttggctcgctgccacctccgtctcccgggttcaagctattctccctgcctcagccatctgagtagctgggattacaggtgcccgccactaggcccagctaatttttgtgtttttagtagagacagggtttcgccatttggccaggctggtctcgaactcctgacctcaggtgatccaccagccttggcctcccaaaaaactgatatatttttatatgctttacacatttcaaaattatgaagtacctacagcttttaggactgaattacatcttttcagatattatgaccatgattcctgggttttcaaaaatttgccattcctaatacagttttgctcatccttcaatttttgaccatcctaaatcacttttctaacacgtgtccttcatatatggcatagggtttataatcgcttaaattccaacctaatttaaacttattctcctttaaaatgtaagttaaatccatttatatttattgagctgacatgtgtttggtctctgttctgtcatattatttcacattttctgtttttatatattaaagtctttaatattttaaagacttcatgcagtctattttctttggtttgctttctgtgtatagttctaagatttgatgaggtctgtagttctgttatgatgattatttttattaatgcatatcgtcagcatacaatagttccctgttacaagaaataaaaaatagcgttctctccttcttccccattcccttcctctcctccccaccacccaatttaaatcaataacgttatctttcttatcgttacctttgtattattaaaaatgtgtgtatgcctatcacttcattagtcagcttttaatgacgtcatttaaatcagcagacttattttaactcctactttcttcactccgatttgtagtattgtaaaatttctatattgtccatagtcacttcaagatggctctatcacctttagccagtgtattcttacagtgctttctgaaatctgttttttctgggttctttcactaaccttttgcctttatccttccttttctcttttacttttttcagctgctcttcctgtctgttgcttttatattttacagtctgtgaatcatatttgtctcctactttttactaaagatggcatctctgaagtgtgtttcttcattctccttgaagattttgtatagatttcaggaggagaaaaagaaagagacttacttacacagagtcatactggaagttcctgtatgtgtttgttgctgttgtgtttgttttgttttgtgatcatgtagcgtttctcatgcccattaaaggatcaaacctcacaaaactacaaaagcagtgactctggtcacaggtattataggtattttaacaaaacaattaagaaatcatttgaggagtaacctttcagcacttctcaaggtatagaagtgctgtgatttgaatgtttgtcccctgcaaaagtaaggttgaaatttaattgtaatggtattaagggtgggacctttaaaaggcgcttaggccatgaggatctgctttcataggtgggattactgttgacataaaagggcaagttcggccctcttgatctctttgcccttctaccatatgatgacttttgccatgttttaacactgaaagaaggtcctcaccagatgctggaatcttcatgttgggcttctcagcctctggaagtgtgagccaataaatgtatgtttattataaattacccaatctgcagtaatctgttaaagcagcatgaaacagactaaaacaagaagcaaatggctttttagcaatacaattatctaggccaacttctaaccgttcctcacctggtaataaccattttcctttcatttctgttttacaagtctaattttacagaattataaatcattagcaataagagtgatgctgtagtgcatattctcaaagaaatttaagccgttgataattttttcttggaaggtaaatgtcttgtgcttattcttaattattcaagtgatttaaaaatgtggacataatcataactgtcaaggtaaagattatagtgaacatatccacttggagtacttcaggagagttaaataagattggaaagtattgttcacctataaagttagagaactgggcagaaagaaaaacctattgattacgttacttttgctcattgtttaattcctgacccttcttgaaatagctgcccaacccctacgaaactgtcatacctctctgatggcagttgactagtaataaaattcaggtcaccatctattacaggccagagagtctgactttcagcatagtcttagtgaccaaatttgccaaatgctatagaatattccaaaaacaaaaggtttcattccttggtatagatagtgtccatctataagataaagaaaattagatctaactcatacaattggtgtgaagatcaaataagaaaatgtggataaagtacatgagccataagtaatcaataagtgtcagtggccctcctgtgtgcttctcagctcttcctcccctccgccatttcttactactataacctggatttcccttggcaatagtccttttggacttcccaaaactaggaaactttttgctgaaagcagattattctttgtttagtggagtataatgtagtcctctagtgatcagaaatggagtaaccatttttttcctcctaaatactatttggcttattaatgacttgctcctattatggcatttctcacattgttttatagggttttttttttttttgcacatatttctttcatcttgatttcaaaatatagaaaggcaaagactctacattttcttcttcaaatctatgacacagtattagtgatctattgccgcataacaaattactctgaaattcatcagcttaaaacaacacacatttattttctcagagtttctcagaagcagcttagctgcatagttttggctcagggtgtctcacgagattgcagtcaagctgtttgctggggcgactgtcatcatttttcatattcttggctgtgtcatataatgttcaacagagtctctctctctctctctctctctctagttctcatttagattctatatgagacagaaattccagagccaatttacttttgaaaaacccctcaaattacccctaaaacacagtctatatccctttcaagatgttgaacacagtgaaaggtctggttaaaagctggggagaatagtgggcttagaatcagaggacatgttctatgaaaaattacataattttaaatacaagaattatatttaacttagctacacagacacacagacacacacatacacacacacacacacacacacacacacacaagaggcattcagagactgaggaggctgagggtacaaagtttcctatctcaccttgaccacaggactcactctcaattagtggattagcagttgcaatttaaaatttaaaaagttgtttatttatttatttttgccaagttgaacctgcatacatgaaatacattcatgatttaaccctgacatattaatattaaaaggtaaagaagttttcagattcatctttaagtgttctctcagatttgatcttatgctttctctgtccagcatttctgagctttgctctgcttgctgattgatgctaacaaagcaggcctcagaattgttctagtattagagccactggaagccaaagtgcttcttgcagaatatagtattgttatgttgtattccaatcacacagataatactttaacacaaaattatatttggttattttaagtttatattgattagggtcattacatttaattaaatttacacagcatgaaaggcaatagtgtcatgatcgcaagtgtaaaaatccaaacacacacacacacacacacatttgattcataggtttttgaatcaaacctatcccttaatattggtttgttgtatgatcattcttctagctaccggctagtcctctctggcagataatcaatggcacctgtcaaaagtttaagatgcataatattttttaaaagtattgtagaaaaacaagtttaagaaaaatttccttgagttatttttccccaaactggaatacagttacattttagccaaagcccttgcgttcgcttatagaagataaaccttctgttgcaaccaaggagacaattccaatctatctcatgagctgcatggaaatctgaaggtcaaaaaactctgaatgtctttcttctgttatccttgttaaaaaataatatatcccatctggaaatttggagcttgagtcctctgtggtaagtgcttcctttgttgttatgtaatctttattttctaaattctttaccactagttgtgtaaagttggtcctgatgtaggtacagacatacacacgcctcggttaagagtaaaggttttgaataagctggcttctctgaccagaatattgctagaatgtaagcactgtgagtacacaggcctccatatattttgctcactgctgtttccctcgagaagtccctggcatttggtgaaggcttgatcaatatttgttgagtgtttttatggttgaaatcattgtttatgttccattagctttcaccatttttttttcatacctctgtattagtttcctagggctgccataacaaattaccaaaaacttggtggctttaaacaacagaagtttattctctcacggttctagagtttgtaagtctgaaatcaagctgttagcaaggccacactccctccaaggctgtaggggggtatttttccttgtctcttctagtttcttttttctggtgaaaagatacatatatttagaattagccagccagactcagtttagatgatcccaattttgttggcaacatccaaagcatcataatcaggacccagaagaatatgtgccttcttctctctatcagtcctaaccagggtgttgaccttggccacatcaatgtcacagagctttttcacagcctgtttgatctggtgcttgttggctttaacatccacaatgaacacaggtgtgctgttgtcttctgtcttcttcatgggagactcagtggtcagcagaaacttgatgatgacatagtggccaagcttgtttctcctgggggtgctctttcgaggatatttgggctgcctctgaagtcacagtgtcttggtgggcgggggtcgtgcagattttctttatgtgtgtgtgtatgtggctgtggacacctttcagcactgccttcttggccttcaaagcctttgctttggccttggctttaggagggacggaagcttccttcttcatctttggcaccatcttgtgaaaagctctcttctagtttctgatgtctccaggcatcccttggcttgtagctgcacaactccaatctctgcctccatcttcacatggtcctcccctatgtctgcttctgctcttctttttataagcacatttgtcattggatttggggcccacctagttaatccaggatggtttaatcttgagattcttcacttaatttacaccaacaaagactctttttccaaataagatcacattcacactcacacgtatctgaagttggaacttggacatgtttttcatggccacgatgcaacccattacaatgtctaactaccaatattaagattctattcattcaacacacatttttaaaatatctattatgttccaggcaccaaatggtgaggatgcaaatatcagcatgatgtggccactgtccttccttagccagatgacaacttatcaaaggtttttatcctaatccttctgtaataaaatatattttaaattcacataaaaggatatcttatctactctgaatcccttcgtattaatttttccataaattctaaagaacactcttcattgttactttttcaattgtcctattattcatttttcagatgttattagctcgaggtcatttctttcaaaaaatttcatgatgtgaaaccattttaattagtttcaacatattttctttcaccacaagtcaaagtacaggagcagtaaacttagcaagaacccattcatccctgtaccattttgtcattaaggtaacatcaatatccctccggctgaggttagccatatcttatcatggcctggtttctttggaaagcagagcctgagaacatataggtagtttatttgggaaataattccaggaagcaggagtgtcagatgggggcggtttggaggggaacaggggatcagggaatcaagagggagaaactaaacaggaatacattgccaattgagccctcacaatgcagtaactggtttttgcccccgtaagactttctgatttttttttttttttgagatggagtctcactctgtttcccaggctggagtacagtcactgcaacctccgcctccccagttcaagcaattctcttgcctcagcctcccgagtagctgggacgactggtgtgtgccagctaatttttgcgtttttagtagagatggggtttcaccatgttgatcaggctggtctcgaactcctgacctcgtgatccaacagcctcagcctcccaaagtgctgggattacaggcgtgagccacttcgcctggcctactcccttactttcttagtaaacttgctttcactttactctgtcatctcacttttgatttccttcctgcatgaaggcaagaacccatgtgacctcccaggctgcacccccttgaggttcaccctgtgaaagaatgactcacaggactcaggaaaacactgtacttacaattactcttttcccataaaggatacaaatgaatagtcagatgaaaaaacatatgatggcaagatctggaagggtcttgagcacaggagcttctgtccccatggagccagggtctgccaccctcctggtacatcaatgtgtgcaccaactgggaagcagttcacacctcatcattcagagcttttattgaagttttattatgtaggcatgattgaatcagtcattagccacattagcctcagtttctggcctcccctcctcagcaggcagggactggggctgaaggttccaaccctctcaccacatggttgattttcctagctgccaccccccatcctgaagctctctaggggctctgccaaaagttaccttattagcatatacttggatatagcaaaagtggctcattatgaataacaaaagacactcctgtcattaaggaaattccaagagtttctgaaactctgtggcaggaaacaggggcaaagaccaaatactttttttttttttttgagacggagtttcaaaacttgtcacccaggctggagtgcaatggcgtgatattggctcactgcaacctccgcctcccgggttcaagtgattctcctacctcagcctcccaagtagcctaaatacatgttttgattattcacagtacaacacatagggagtgctcactgaacactgacgattgttattctcgaggtgtggaagctgtgtcatagaccacaatcatcacaaccacccctggaacaaacacctctgctgtgttaacttttgaattaaaaaagtaaatcttaatttaaaaaaaagaattttcaggccaggcacagtggctcatgcctgtaatcccagtactttgggaggcctaggcgggcagatcacctgaggtcaggagtttgagaccagcctggtcaacatggtgaaatcccgtctctactaaaaatacaaaaaattagctgggtgtggtggtgcgtgcctgtaatccctgctactttgggggctaagataggagaatcacttgaaccgggagatagaggttgcagtgagccgagatcgcgccactgtactctagcctgggtgacagagtgagactccgtctcaagaaaaacaaaattcagagcagaagatttggaaatgttacagatcacaagctctttggtttcccatgtaataaaaattaatacggggccaggtagttttcccagtcaaggtttttattttggagcttgtgctcaagctcaaggaagacagtggaggtacaaggactccctgaaaaagctggttggggcttttttattaggcaaagcacgggaattaacatcaggtgtagggtatgcaggctgggttgggcaaagcatgtgaggggtagattattcagttagcatatctggttgcaatgtttatcttgagtaatggaccacctggtggtctggctggcagcaacaaagctgtaaatcaattgttcagcattccttcccaaggtgggacagtccacaatatttagatttcctaagccagtttctggaattctttacgtaaaaggcatggttacatgttatgaaagcgcggaagaacggctgttttctttgtgtgactaaagccttgggattcgtgggcatatcaccagcgagtggtgtgggttttgtgatcagtggaactagagaaaaagaaaaaaaaatatgtgaaggaggagctgcatcccattcctattctatctcagaaataagttaaagcagtaccagctcaagttaacttcctttgacaaaatgtgggaagcaactatattctaccaatgcttaaaacaaaaaataaaaacaattattttttcagggtgtctaaattaaggcattgaactgaggaaggttggattacctacaagtacaataaacagttcttgtacttgaggagttaaaattctaggcagggagaaatgacattaacatggcactaagcagaatgaaggataaataaggggtaaaagagtaagtgaagcactattgcaaggcagctcttgagtacattaataaatgaattctataaacagtaaatgccaatgaataatgactccaggtttgggaaattaagaaagtgtttacaggaagtttcagtaccaaggttgattggattgaaacctttgtcaggacagcaagaggacattgaaagaagcagaagtacgggagcaaaaatttaaagacaggaaagacaacgtgtggtcctgggacgattagttcacccttactagtgttttgggtttaaaacgagcaacacaaagctagtaatagcaatatccaaattccaaagaatctcatgtttattcatgatcttttcactatgagtagactgtgttgatctgttagcgagtttattgtttcaaaggaggaaaacatattgaggtcagttacagaaatggaatatttgaagtcgatgaattcaaggaaatatattcaggtcaccaataccttgtgcagaaatagataaaaagaagagggtaaaagtgcaaattatttacattcttgaaaccacaaaagtgaactgagccaagaacacagctggaatgtgacccagtggggtagggagtcccacagagcctgaacacaagcccacttaggcttccttggttaagacctgaacttccccatctgataatgggaaaaaacacatccaaaggaagtaaatagtaattacatgtggagctagtggttgtctttctagttccaccttgggattgaggttacaaaagataacgtagagagaaaacattctaaagttatttataatagagttaaattgaacttaattaaatgtttgtttgagagtttatgggcccgagtggatttctctccctgaccttggtcaaagtcagtctataataaatcaagtgtagcatatctacatggtagtgcatattccttttttttttttttttttttgagatggagtctcactctgtcaaccaggctgaagtgcagtggcatgatcttggctcactgcaacttccacctcctgggttcaagtgattctcctgcctcagcctcctgagtagctgggactacaggcactcgccaccatgcccggctaatttttgtatttttaggagagatggggtttcaccatattggctaggctggtcttgaattcctgacctcgtgatctgccttcctcggcctcctaaagtgctgggattacaggcatgagccactgtgcccagccagcagtgcatattctattggtattgctacctgaaggaagctgggaaatggcaggcttattcttctctccttaggattatagccactccaacagccagtgcacccatagagagcagtgggaaaagcacaaaagtcaataggaatggctaatcatttcatttagcctttacaacaccaagagataagaagaatagactttattgttcctattttacagatgagaaaactgagctccagaaagattaaacagttttaatagtgatatctctttttaaaatcaaagcatataggtgctttgatgcaaaacacaatgatatgagcatttcataaattaacattttttctatctagttgatgaatattttcttctctcttttttaaagggtttaaacattttcttttgaggtttgttttttactatttttgagacaaggtcttgctctgtcacccaggctggggtgcagtgacggccatcttggctcactgaagccttgactttctgggctcaagcgatcctcccaacttagccttcagagtaggtgggactgcaggctcatgccaccacacccaactatttttttttttttaattcattttatagagacaaggtctcactgggctggtttcaaaccagcttagattcaagcaatcctcccactttggcctaccaaagtgctgagattacggcatgagctactgcaccaagtcccataaatattttctatgacgcttgctaaggcttttttcctgtatatggtgtgtttaggacttgaacaaagaggtttaattcatttctcagaaagctcaacacttttttcactccttcaagtaatgtttcattttgctttgtttgatcaatagttcttttctcatttctaatttaataaagcacaactcttcttcccagacaatggaaagcctgaatcaacaataacaatttttgtgggcagattccatggggagggatacaaagtatcaaactgctatgtgaagaattgaattttataacattctgggaatctgtgaaggaaaaaataaagccaacacagggtttcttggccataaattgtaaacatagtgttctatagttgggtgccattctaacggaggcagccctggtacagatgacagtgttactaacaactctaatggaaaacttgcatttgagtctcatctctactgcttactaggcatgtggtgatagatgggacactacaccttagttgcattttcaacaaaatgaagataataatacctccttgagatattgctaaaactatatataacacaacatcgcaatatccacagagtcatcatctcctgaccaccagcaccataatcagcaacatctcataataaatcacaggagtggttattagggaaaaaagagaaaaagcctatatcttaataataatatactagtcattctagatatttgatcctcttttatttccatccaatttccaattgactcatttacatttatttcacaacactaaaaaggaactattgaatgtttgttggaaaggcctttggattgcaagttagtgatagccatttcattgtaaagcagaaacacaaaggtttatagaacctatgtgtagtttatatagtcttttatgcttccactgtataaaagagtgatcaatataaaatagaaccatagaagcaatggactgtagatagaagtttggaaagcaaataacttgaacaaattggttttggtgaaaaataatgtactctgattatcctaaccccaaagtacacatcatccctagagtgccacatgaccatcctgggcatttcttttagaataatataagtgcctaagaagcctcaggaacttggaataaaatcaattagtatttgctgtaatttccatagcatgtgtgacccttgggttgaagagttaaaaagaaatgtatgaagcctagccaagaagtctacagtggaggaaaaagtatttgtctcaattttactccagaaattctgttcttgaatgggaatgtagacaagaatgaagaaattcattgaatgaaaatactaatttatatccgtggcacttagtcaactaatttgtttcaggcttttaatagttgaaaatgttggaccagcatttatttacttttgttttttagagatgaggtctcactatgttgcccaggctgtgctcaaactcctaggctcaagtgatccttctgcctcagcctcccaaagtgctgggattataggcgtgagccactggtgcctggcctagatcagcatttctagagtccaacaggagtgttagtgttttaaagaagaacgtaccttaatggttttcaaattcttcaggcagcaagtctggaaatcatgatgctttttgtggaatctcatgaaatactaatatatttaactcatattgtggcagactggctccatgctcattactcttgtttcttttcctggcacatgtgacagctccactttccagcctcccttgaccttcagttggagccatttgactggagtatgaccaatggagtatatatagaggtgctgctgactggacacatgaccagatgcaccatctcttttccccttctgtggcaaccacagaggccacacattacagagcataacatgaaggaagcacagaagcctgagtcgctgcttgaaggagaaactcccagggggccaaataaccagaaaattctaccttggattttgcttaaataagaaataaatctttattgtgttaatccactgaaatttggagacgatttattacagcatttagtgttacttactgtgatggttaattttaggtgtcaatttgcctggattaaagaatacctagaaacctggtaaggcatttgtattagttcattctcacactgctataaagatactatcttagactgggtaatttattaagaaaggaggtttaaatgactcacagttctgcatggctgggaaggcctcgggaaagttacaatcatggcgaaaggcgaaggggaagcaggcacgtcttacatggtggcaggagagagggaagaagggggaagtaccagaaatttatcaaacaaccagatctcgtgagaactcactcactaccacgagaacaacatggggaaaaccacccccatgatccagtcatctcccaccaggtccctccctcgacatgtgaggtttacaatttggattacaatttgagatgagatttgggtgggcacctagccaaaccatatcagcattgtttcaggatgcatctgtgaggatgtttccagaagagattagcatgtgagtctggatgaactaggtggggaaagtggtctggcatcatccaatctgctgggggacgccccagagaacaaaagcagaaaaaaggtgaatgtatcaacctatctgctggagctaggatacactcttcctctcttgtccttcaacaacatatatatatcttcttgactctgtctctctgaagaactctgatacacttactctaactcagtgttgtcaaatatagcttgaatataggccttctgatattgtaaataaagttttatggcaacactaccatgcctgtttgtctgtgtattttctatggctgcttttgcactacagtgacagggttgagtagttgcagcagagatctcatggcacacaaagcctacagtgtgtaccatgtggccttttaggaaaaaatttgcttatctctgctctaattaatatacctatgaatggtaatttagctccaaattttatatttggttgtttaaaatttgtttacatattaataaaatgttgacttaaattaataattagcatattcttacaatttgcaaaaaagaaaactctgaccatagcacatggtggcaaggctatgaaacaatagggacccctataggccactatgggtaaattacatataaattaaaacaactttgtaaaataagcaatatcttaaatggataagttatggcatagttataaaatgggatactgtacaggctgggctcattggctcatacctgtagtctcaacagtttgggaggccaagatgggaggatcacttgagcccaagagttagagatcagcctgggtaacatagtgagtccccatttctacaaaaaataataaaaaaaaaaattagctgggtttggtggcatgcacctgtggtcccagctacttgggtgtctacagtgggaggatcccttgagcctgggagatagaggcagcagtgagctgtgattgtatcattgcactccaacctgggtggcagaggaagactgtctcaaaaaaaaaaaaaaaaaggaatactagaatactatacagtagttaaaaaaaatgacccacagttatatgcatcaacagaaataaatctcacaaatatatgttgacaaaatacagcaagttgaagaaaatttcatacaatatattaccttttaggtaaagttttaaaagatgcataaaattctgcataatttcttagggatacagtcatgtttgaagataattgcagggtaatatcaatcaccaaatttaagatagtggttcccaaccaaaatgcccatgaatgatagactggataaagaaaatgtagcacatagacaccatggaatactatacagtcataaaaaaagatgagttcatgccctttgcagggacatggatgaagctggaaacaatcattctcagcaaactaacacaggaacagaaaaccaaacaaccgcatgttctcactcataaatgggagttgaacaatgagaacatatggacacagggaggggaacatcacacactagggcctgtcagggggtggggggtaggggagggatagtattaggagaaatacctaatgtagatgacgggttgatgggtgtagcaaaccaccatggcacgtgtatacctatgtaacaaacctgcacgttctgtacatgtatcccagaacttaaagtacaatttaaaaaaagaataaataaataaataaataaataagacagtggtttctccaaagggagggagttgtaactgggggagagaatacaagagtttcaaatgtaaaggttaaattctacttctgaagctgggtagtgggtacatgttatattacccctgtgctattctttatacttttttgattgtttttaaatgtcaccataaattttattttattaaaaaataacatttagtacaatataaattgctttaagtttataaaacagaaatgttcaattaaatcaaacacttgcttggtggatttgttatcatgagtagaccatgagctcatccaacttttaaaaacgaaaatacaaatggaattatttgcattcaacggaaggtgctgctatttggaccttggattaactcagtctataaataacctcgaaaaaataataaacaacagtcttgagatcttatgcattgattcatagtagaggttattttgtaaaaaggctaagataactttgccataacctaactgtatactcatactacaaaaataattcagttggcttaggttcaaaatccagccacagtgtcgctattgtgctgaaaggtctttgcttgttgttatttctcactacttctgaaatccattacaaccctttggttatcttcagtgctgttggttctgtctaattattccctagagatagactagaaaacacagatatgaaagtaaggcttgagattttaatgacagcaggttggaggtgggcagtgaaagtgactgacaagtagatgatctttctgcatagactctatgccaaataagaaggtctacagtcataaacatttatatattgacaactttggatataataattctaataatagctttatagagttttacagaaacagtaattaatagatcttgatatttcacttcctgctgatgtcttagacctgattttaacagaacctaaaaatagtttctaatctgaattcattaaatacactcacacttaataggaaaagaacactgaataacacattcaagtgtcaggatttaaaaactcaagccaaaaaccatttggttaatcaggacttctctatttatttgtttatttattctctatttcctaatcatttaatatctgacccacaacacaaatgcaatgcaaagaaggctccttaaatggatttttatatagatctcagaattgcttctaatggcaaaaatggaagacagaacaaatgcaaacctcctttccctgctgcttctaaaattctgttttggagaaagcatgtattttagtaaagcataggaaagagcttgatttcttcctttgtgacaaataaaatggaataaatacacatttcttcctaacaccttttatattcaaaggataagcagacttctagaggaacaaaatgatgttattaaatgaaatgcaaatgttgaaagagtatatgcattatatatcttagtgcaaagccttccgatgcttgtcagatcaattctgcaacctcattacacacttacacatttaggggatttctgctttaaatattctcacagttttcaaacattttcagcaccttagcaggaaactcagaggccactgaacctgctaaggataaacttaatactggttgatgccggagcccaggtgaagtcctgtgctccagagagcctttaagaagatggtagtttattaaagttatcagacctgggggaagatgacagtaattgggggagaagataattcttgcagtttgaaaggaacaatcatttcttatctttgatgttacaaactcagaggtaataaggcaagattcatctttgccaagttgaccaccaaccctgagtcactaagaccatgagccctgttaaagataaaaaccaacaagtaaggaaattgatgttattcagactatcaaaactaggagaaaaccccacagtgtcttggcaaggtagtttgccttacacatttttttttttcagacagagtctcactctgttgcccaggctggcagtggcatgatctcagcttactgcaacctccgcctcccaagttcaagcgattctcctgcctcagcctcctgcgtagctaggactacaggcgcgtgccaccaagcccagctagttttttatatttttagtagagacaggatttcactgcgttagccaggatggcctcaatctcctgacctcatgatcatcctgcctcggcctcccaaagtgctgggattacaggtgtgagccaccatgcccggcctgccttacactttcatagggaggtgtagacacgttataaatggggtgatttacagttaggttattttgcaattaggaaaattctctgttagccgaaaagaaaatgtttatctctatgtctagctatattcaagggtacaggtagttctaatctcagataatcattcatgagacaaacaaaagagaggtggagggtctgtctctggcctttgagcaggttcaagccaaagaagaaaggtctatatttggccttgtcacaggtgaacaagggaggcctccatgcaagtgtgataggagtcatcagaaagtggacagccaatctgacctaactctatgagggaggatggctctttgccataaaccttttcctggaacaaaaaagagttgggggggattttggatgacaaaatgttgtgaggatttcttaactgtgctgttttatgggagcacagggctcaggtcaagttcaacaatgtcaactcatttactcatctgcttatccatctacaccaaattgcccaccttacctgggaacaaaactagttctctattgtcacattcaatcttgtctaatcaaccttgtctgatcagcagcaacatatcagaattaccaaaagtcaatactgaaaaggccagacttccaatgttagtcagcatttatttataccaaggtaagctcctaaaatttatacataaattaaatgcttatagaataatttggaggtctcatggaataatgattacaagtctgtgctctgctgtcagtctttctctgaatttgctctttgcagaactttctatgtccctgtttcctcatctctaaagtgaggatattgctctcccatccttacatggtcataatgaggattaattttgataatgtgtctaaaacggcacttgtcaaactttaatgtgtttcagaaccccattggcatctggttaaactgaagtttctgagtccacctgtctggggtgaggcgtgaggctatgcatttctagcaagctcccagttgatggctatgctgctaatgtccagaccacactttgaatagcaagaatctaaagcctcaatcacactgcctagcacacagccagtggttaatcaataggtgttattggtattagattatacacctgtgcataaaatgaggccaataaagccttctgtaaggtacatacaccctgtgtctttgccttatgtgtggccatacatgtgattacaaagtaatgagacatacaaactgcatgtgaaagtcaccctgattttgctgtctcaagttctgctcagtgttacactctgctagaattgagtatactttctcagctaactcttcaatgcctcactaattaacttttagtctgaacattactcattaaattgtgagccccttaaactgctctctgaaagttcagaaatgatcaaatcaatacacctggtgttacaaaagaagattggtcaaggaggaacaagaaaggctatcgagtgctgtgaaactcacagaacagtgagccaggcatttctcttctgaaactcagagcttactttcaaagtgggatgacttaaaaggtaaagagaggctcatagttcaactgagaggatctctatggatataagacagagggacaacttcaaatatctaaactgaaaaattacatgactgtgcatggagatgtgttttaaaaagccctgtggaattcacatgcactgctggtgggagtataaattggtacaaccactttggaaaactctttggtagtactaggttggtacgaaagtaattgcggtttttgcattatgggaatttgccatttgatattggaatacattcttaaataaatgtggttatattatacatcattttaatgggcatttctctctttatacttttttgctaatgacttattacttgctgtttagtttatgtttattttagactatggaaatgatgttagacaaaaagcaaattcaagggattttcttatttgagttcaaaatgggtgggtcataaagcagcagagacaactcgcaacatcagcaacgcgtttggcccaggaactgctaacgaacgtacagtacagtggtggttcaaaaagctttgcaaaggagatgagagccttgaagatgaggagcatagtggctgaccatcggaaatttacaacaaccaattgagagcaatcttcaaagctgatcctcttacaattacacgggaagttggcaaataactcaacatcgacctttctagggcatttgaaacaaattagaaaggtgaaaaagctcaataagtggatgcctcatgagctgaccaaaaatttaaaaaatcatcattttgaactgttgttttattctatgcaacaacaatgaatttctcaatcagattgtgatgtgcgatgagtagtgaattgcatacgacaaccagtgacgaccagctcagtggttggaccaagaagaagctccaaagcacttcccaaaaccaaacttgcaccaaaaaaaaggccatggtcactgtttggtggtctgctgccggtctgatccactacagctttctgaatcccggcgaaaccattacatctgagaagtatgctcagcaaattgatgagatgcaccaaaaactgcagtgcctgcagccagcaatggtcaacagaaagggcccaattcttctccagggcaatgcccaactgcaggtctcacaacaaatgcatcaaaagtttaacaaactgggctacaaagttttccctcatccactatattcacctgacctctcgccaaccagctaccacttcttccagcatcttgacaactttttgcagggaaaatgcttccactaccagcaggatgcagaacatgctttccaagagtttgtcaaatcccgaagcatggatttttatgctacaggaataaaagaaacttatttctcattggcaaaaatgtgttggttataatggttcctattttgattaataaagatgtgtttgaggctagttataatgatttaaaatccacggcccaaaaccacaattacttttgcaccaacctaatatctactaaagctgaacatgcacatgcccagtgacccacctatggaatcctactcctaggtatccaacaggaatgcatatgcatgttcaccaagggacaggtacagaaatgcttaaacagtactagtcatgatagcccagactggccacaagccaaatgaccactcattagagaatggttaagtggcatatcatacaataaagtattacacaccaatacaaactgttgaactacaatgtatcacaataatgtggctgaatctcatgaatatgttaggcataagaagcaaaacaaaagaatgaaattaaaaacaaacaaaattaacctatgttctgttcagatggggccacctttggggtagggactcggaagggcttctgcagagctggttatgttctattacttggtctgttgcactggttacagagtatgtaaactctgtgacaagtcattaaagaggataaacaactgtttttctaaagtctcacaacacttctgacatcaaatatgtgggttttccacactaagccattctccaattctctgcaaaccactgaatgtcctacgattcaaccctgacactgtgagttagcatagaccccacagattaaggacttagtttcataaaactatcccctacttaagtcctaggttgtcacatgtacttctgaaaagccagctataaatcaggagtttctacaatcccctcctcatgtttgataacttactataatggctaacaaaccccagggaaatatttacttatgtttaccagtttattataaaagctattacaaaagatacagatgaacagggagatgaagaggtatacagggaaaggtatgaggaaaggctatggggctttcatgccttctccaggagagccacctcccagcacctccatgtcttcagaaactctctaaaccctatcatgtaggggttttacaaaagttccattatgtagacatgattaattagatcattggccattggaggttggagttcagactgaaagttctaaccctttaatcacatggtttgttcttctgtcaaccagcccccatcctgaatctttctaggggctttcagccaccagtcttccactgacatacaaaaagacactttgatcactccaggaattccaaaaggtttagaactgcttgtgtgtcagaaaccaggactaataacaaatacagtgagcccatcatatccgagattcaaccaactgcagatcaaaaacatttggaaaaaacaataaaaaaaaaaaacaaatgtaaaaaccagtatagtatcacaactgtttgcacagcatttacatagtattaggtgttattagtaatctatagatgatataaagtatacgggaagatgtgcataggttatatacaaatactacatcattttatctcaggaacttgagcaacctcctattgtgctatctggggtgaaggggggttcttgaagctaccgaaggacaactacattgtaatgaaaaatgctcctagcacccttatcactcaggaaattacaagagtttcagaagccctgtgccaggaactgtgagcagagaccaaatacacatttcttatgatgtcattgtcatctctctgtccacttaggatttgtgcacttttctctatgtatgccactcattaacaaaatttacattacaaaaaaccctgtgactatcttaaaagtgatatagacttctgaggtgctttgtttttctattcaggaaggtatttgtgaggaagaaatgatttgctcttgaatatttaacctatctttgtcagatctcaggttagattcactctttaaaagatgatggtaaaaagaaaatcctcaggaacatgctgagaaagaaaagcaccatgcttctttttaaccttttttacctttcttcttttttgagacagggtctggctttgttgcccaggctggattgctgtggtgcgatctcagcttaccgcagcctcaaactccctggctcaagcgatgcccccataacttcagcctcccaagtagctgggactacgggcatgtgccaccactcctggctaatttttgtattttttgtggagacatggttttgtcatgttgcccaggctggtcttgaacttctgagctcaagtgatctgcctgcatcggccttccaaagtgctgggatttcaggcatgagccactgcgcctgaccagcaccatgcttcttaaaggagggccacagccttccactttccgtctcctttccactaacctgttatgatccttgaccaaaggccaattaaataatcagaggagacccaagagatccctctcttctccctctgaagaaaaacaaagagcagagcggaactgaggatttgggatgtaaaattaaaagatctaagaagaggccatgagatttatttttattttcttttaaatttatttttatagagacaggatctcactatgttgaccaggctagtcttgaacccccaggctcaagtgatccttttgccttagcctcctaaagtgctgggattatggatgtgagccacgctctgccagagatttctaaaaggctacaaaaacattgggtctatttgagggtgggccaaggcatcctgacccatccaccactcagcacatggacaaagatgaattaaaagaatgaggggaataaaagggagtcagctgtgaactgggaaatgaatcagccttggaaataattagctcacatacgcagtgccatttctaggtgttcccatagctctttattatttccctcattccattctcccttaaactttatctcccaatccaaatcagtctcatttttgttgcaaggtctcctggttgggaatctgagcctggcccccgaagagcaagaattttcatctacatgcagcttgcttgtggaaagaaatctgttaaatgagctttttcagtgtctaccactgctgttgttcatttgtttcccttcagcttttcccagttggtgctcattccctttaattttttacaccaacttgtaccttgttcttggaatccacactctcttatccatactgtccaaatagaaaaagctgtgaaaactaagttttttcttaaactgaatggaaaaccggaactcacatgaggctgtttataatgtcagtttatctcacttactgtgaatttttgtgttttattgcagagacttaaatgtgtttattacaggatgctgctttagatccccctggagatggaatgcaatatgcaatatatgcactgtattatctttctacaatccaaaaatttcaaattccaaagcacatctgggattgcagagctgtaatcaagaattttcttctataatggagataaacttgttcagctgctggagggattggggttaaatttaagcaatagtcttatggccataagagtggttaaacacaaataatttctcccaaagactgtgttaggttgagagatcaaaatcaatcaatatttaacctagagttcaaacttaaaagtcaatttctagctgtctacaggactctgaccctcacacatcagatctttttcctagtggtaaagtaagggggtggatggggaatgcaactcaacacactggggagaggcgtcatcaggtcagaaagaagagaaaataaaatattagtcttttggcaaattttaggttttttgttttttttttagccggattttcctctcgttacccaggctggagtgcaatggcacaatctcggctcaccgcaaactccgcctcctgggctcaaatgattctcctgcctcagcctcccaagtagctggtattacagacgtgcgccaccacacccagctaattttgtatttttagtagagacggggtttctccatgtttgtcaggctggtctcaaactcccagcctcaggtaatctgcccacctcagcctcccaaagtgctgagattacaggcgtgagccaccatgcccagccttggcaaacttgatgtgtctgaagcaggtgataagaacttagttccaggaatgggtttggtgtggatttcataaaagactgggtttttcagagggatggtacccatttacctcctacttagaaggctcctcatcagcatcagctggttagagacagcgaataaaacacaactttcagttacagtattttctagggcagcgtgtctcagacttaccggtacacacaaatcaccagggcatcttgttaaaatgcagattccagttccttaggttgggttgggattgagatccagcatttctaaccagctgccaggtccttctgttgcaaggtcagggctttttaaacttcaacttgcgtatcctgcagggctagttaaacacagccccaccctcagagggtctgattttgaaagcctggagtgggcctgagagcctgtgaattcctcccaagtaatgcggctgatgcaggaccacattttcagtgttttcaagaaaaaattaaataaaacaagcatgccattctttcaggagtattatttatttttatttttatttatatataattattgtacatatttcagatctatcattaatatctgaatattcatttttgaatagaggtaagcatctagatcatttagatataacctggtgtgaaaaatctccttgtaacctttatatgttaaaatgctatcagtaagttggagtataaatatatattcattattgtaggagtttaaagtgctactataattagtgattgtgaaagctgaggattttacctacaaaatcaataatttaaagctttcaagtagttaagtcaagcaagatcagcagctaatagaaatctagtaaaagagaatgtcttggccaggtgtggtggcatgcacctgtagccccagctactcagaaggctgaagcaggaggattacgtgagcccaggagttccaggttgcactgagctgtgatggtgccactgcactccagcccgggcaatggggcaagaccctgtctctacaaaataaagttacaaagagagaatgcctctactagataactttaggaacactccatcctttttgaaccaacaaatgtttacacaattttaaataagaatggaaggcagaataaaaggattatatgtaaaacatatttgaaatctttgcagaattattagattattattcatgacattaaaataacctttaaaaactgtatttttatttcatgattaaattccattccacctatgagttttaaaagagaacagtctaccccggaagttccttctaagttggtgatagttggcttcagtctgatatttatttaaacactaggccagttagcattcaaccgaaatgagttttggcacacttccagcacgaatcttaagaaatgaatcagcggagctcccaagatcatgggtcagacaatgcccttccaccccactggagaagccccaacctccctgcccagctcccctgcttggcactcttgtggaatcttgtggaaagttaaaccagtctgttgatttcctttcttgtgaaagttgggtgaggttagggttgccagattaaatacaggatgttcagttaaatttgaatttcagattaacaatacattatttttcagcgtctgttccaaatatacgggacaaaagaaggcttcccctccgtgtgccttccaaaggtttgctgaaaattagctggcaataggcagattagtaggagaataagacatacaaacttatttaacatgcataagcacaggggaattctggaggatgattactcaaataacccagtgaggtccagatgcatatatgcccgtcttcataggggaagaggagatggggatataggagtgaataatttttagtgcggaatgaatggacctgggtggcaggcagtatcttgtaaatgattctctttggaaattgattgggacctgagaacaaacaatggtttgggacaaagtttgcctgggctctagacatggtgtttaatgttcagtctctttctctgtgatatgagtttatctcttctctggttgatgaatttcagggaagaaatcaaaggcaattgtgcaattttttggtatgtctggtttctaggcagataagggaatttcagagaataacctcatcttgtgctttgtgagaagtgttgagagacaggatcggggtggttggtgagatcagagagatattgaggctgcttcctttgttctgcacgccaaagagccatatttaggggtgttgttttatgaaccccaacatatccaacatgtggaacattcctgtatttttatttgctatatttggcaacattaggcgaggtaccagctgcaggaaaattatcataagatattgtctctgaaactcaacatttcttcccttgtaacatcaaatgggagacatgaagaggagaatgatagtttctttaaatttataaggtatggtataaaagcaatttgccaagggctccattttttagtgtaaatttcatctagtctttaaaacactggttaaaaactgaggaaatcttagttccagtcccacttccaccatagactgggtttgacacgttgagataattattgatcttgtttcatggctctaagacaccaatgcttatcaaataaaccatttaaaaaatgccaccaggagagaaaaaatgctgccaattaaactatgacacaatactaaaacaccattgatgtgtgaagatacatctttatttcagagatattaaaatgtgagggaaaaaatgagcatcttggaattcacaaagcatgatattttgacttgcttcacttatataatgaagataattatcattttccctaccaaatacatataaagattagaccaagaaattaataatcagcttttgtttcacagtctagttttgaattgcatgacagggaactttagtttccaatatagaaagttttccagtgactgaacctgtagaagtagcataaagaaaagtgaaaatgtcttatagtttgtttgaaagatttttttcagttgtaggtcaaaattatctgagtcttttgatccactagtgtagaatcatctttatggttagagacaaatgtcatttaaacaggaagcagctgaatgcaagagtttgtgtcatctgcctgctcatctatcctttgatctgttgatccattgacccactgatccatctacccatcccttattcattcctacctccatcttctatttatccatccatccatttattcattgaataatccacccaacatttattaaatttctattccatgccagatagataaaatttgagaacacagagattaaatagttcttgcattcaaggaggtgccaattttttaaaaaagtactgaaatcctctacttactaagaggtcagatctttttgcatccaaaaatctcaggaaaatagcttacaccttctcttatgtggactactccctttctctggtcaggactcagaacacagtattacaaagtattgtgatactttttggaacactgagtatttttgagctgaaggagataggaaggacctcagaagctagaaggtttccctgatcttctccccccatcctgtctctcacccctttttcttccccaaagcaagccataagaccttatgacctacctttcctgaaagtagatcataatactctcatatgacagatgtcctggggaaaggaatgctacacagagagaccaagaagaagctgaacaaagagactttgctgaatttcctcctcagtttattactagatcatgcactttttgtccagtcatgtttctcctcagctatccacttatttcatcagacttagcctaaaaatacagttttccctgcatctttcggtcttcatttctgaagattccatgtcatataaaactttgattaaatacatttgttacatttttctcttgttaatctgtcttttgttatagacgtgtcagctatgacccctgcaatgggtgaggaaaaggtattaacttctttttttctttttctttattattattatactttaagttttagggtacatgtgcacaatgtgcaggttagttacgtatgtatacatgtgccatgctggtgtgctgcacccattaactcgtcatttagcattaggtacatctcctaatgctctccctccccccctcctccccccgacaacagtccccagagtgtgaagttccccttcctgtgtccatgtgttctcattgttcaattcccatctatgagtgagaacatgcggtgtttggttttttgtccttgcgatagtttactgagaatgatgatttccaatttcatccatgtccatacaaaggacatgaactcatcattttttatggctgcatagtattccatggtgtatatgtgccacattttcttaatccagtctatcattgttggacatttgggttggttccaagtctttgctattgtgaatagtgccgcaataaacatatgtgtgcatgtgtctttatagcagcatgatttatagtcctttgggtatatacccagtaatgggatggctgggtcaagcggtatttctagttctagattcctgaggaatcgccacactgacttccacaatggttgaactagtttacagtcccaccaacagtgtacaagtgttcctatttctccacatcttctccagcacctgttgtttactgactttttaatgattgccattctaactggtgtgagatggtatctcattgtggttttgatttgcatttctcaaaaggtattaactttcttacccgtacacgtctcattgactattcaaagcccactcatttcttcaaaagtccgctcaaatcctcccactccatgaagtcttgccttatgaatctcccccttttccaaattcccaaattgcttaaagtattttatttggctcctaattgggcattgaatgagtaaaatatatagtatgttagatagtaatactagctaaggagaaaaatcaagcaggaaagaatacgatgaatatccagaaaggaggaggtttgaagttttaaataaggtgatctgtgaaagtcttactaaaaagcagaattttgagtagtaatctgagttaagcaaggggtgaaccatgtgggtataagggagtgaaattccaagcaaagagaacagctagtacaatagccctgaggtgggagtgtatctgatatgctggaggaacaggaagtaggccattgtgattgtaatgcagtgaataaaaagatgaagttggacactttgggaggccgaggctggtggatcacgaggttgggagatcaagaccaccctggctaaaaaggtgaaaccccatctctactaaaaatacaaacaattagctggacgtggtggcgggtgcctgtagtcccagctacttgggaggctgaggcaggagaatggcatgaacccgggaggcagagcttacaatgagccaagattatgccactacactccaacctgggtgacagagcgagactttgtctcaaaaaaaaaaaaaagatgaagttggaatacgaaatcagagaggtaagggaactaggccttgtaaggtctgtaagttttactaacaaccttgcattttactctgaatgggatagagtgccattggagggtttgagaaatgacatgatctaatttatttattaactaatttttaacatactctctttgccctctgtgttgagagcagactgtgggatgaggcaagggtggatgtgaaaagaccaattaggaggactttgcaatagtttagtcaataaataatggtgacagtggtgggtagagagatgtggttaaatttggaacatatttagaaacaggtccgttagaatttgctgatggaatacaaaagaaagagagttaaggatggagcctgggcaactagaaggttaaaggcagcattacctgagattaggaaaactgtgagaggcacaggatttggagaaaaccatatgagcttagtgtcaagtttgagatgagtattaaacatatgagtggaggtgttggctgggcaatttagtgtaaaaatctggagttcagaggagacatcctgttgggagtagatagctggtacttaaagccatgatacaggatgaaatcaactaaagagagaatgtaggcagaaaaagagaaaatattcaagcactgagtacgggagatgttgctgtaattatctccatcagagcagaacaccctgacctatcagaaagaagtgctgtccaagccttcctgatccttaaaactgaagataggataggaaacccactaaagtggaaattacaaatgttcactaggtatctttgacataggaagaaaatggaaaagagagagctttggagacaaaaacagaatgctctctgagctttttgtaatacctgtaagctgtctccagcacgtacagtgggtaccacatatataaaattccgttttaagacaagtgagaataataaaaagaaaacttgataactgaagaaggtcacatgaatgagtgttatcacaccaattctatgacaccaactgtgtgtcctgcaattcaattttaatgctactaaccaagagtgagcacagttaaatgaggtttagcctaaagcggcctccttagatattttaagttcatcctaaaggtttctctgtacataataaactgaaacctaactggatgtgtaaacagactaacctacttttgtgccaatcaccaagttttggccaatcaaaggtgaccaactgttcaaaccatgttcaaataaggcaaataccaagctgcaaccaacgtggctatttctctacctcacttctgttttccgtacctcactttcttttctctgtccataaatcttcttcttccacatggctacactgaagtctcttggaggctactctggcttggaaggctgcctgcttcatgaattgttctttgctccattaaactctgttaaatttaatttgtctaaggcttttctttttaacagtatagaccccacaggttagtgggttagtcctccacaatatcaacttcacttcatacatcagccacaagtggtccccaggatacctgcacttctgaacagccagttccaaattcagggtttcccatgacaccctcaggtttgataatttgctagaatgatttccagaactcaggaaagtactgtgcttatgatcactgttttattacaaaagatacagcggccaggcacagtggctcacgcctgtaatcccagcactttgggaggctgtggtgggtggatcacaaggtcaggagttcgagaccagcctggccaatttggtgaaaccctgtctctactaaaaatacaaaaaaattagccaggtgtggtggcgtgtgcctgtaatcccagctactcaggaggctgaggcaggataattgcttgaacccaggaagccatggttgcagtgagccaagattgcatcactgcactccagcctgggtgacagagcgagactgcatctcaaaaaaaaaaaaaaaaaaaaaaagatacagatcagaaacagccaaatgaagagatgcatagggcaagatttggtggtagaggagacatagagcttctaagcctttcccttgtggaatccgggttcatcaccctcccagagcattgatgtgtgcaccaaccagaaatctccacggaacctcggtgtccagagttcttattggaattttattacctgggcatgattgattacattattgtcatatgattgaactcagtctccagttcctctcccatccctggaagtcagactgacccaaagatccagccttctgatcacacggttggtctttctggcagccagctcccaacctaatgctagtgtcccaccatgagtcaccttgttagcataataaaaacactcctaccacaggaaattccaagtgtttttgaagctctgtgtcagaaactgagaacaaagactagatcgattcttcatgataccatggtatagcagatcacattttccaaaatgatcacaatgctatcttctaccccacgtgctcttcttacactcttcacatggagacataagggctatgttcccacttcttaaatctcagtgtgctgtgacaatagtgacagtggcccactgacttctgaacttggactataaaggatggtgtaatttctgtttggtttctcctaggacacttgctcttgaaatccagacaccatgccctgatgaaacccaggccaggtggagaagccatatgtaggtgttttggctgacaggtttcactgaggtcacagaggacagcaacatcagcatcggtcattagacatgtgagcgaagaagacatcaggaggctccagctgccagctgaccacaactgcatagagactcctgactgagaactacatacctgagcccagtgaacctccaaaaccatgagcgataataacaacaacaaccaggtccagtgactcaggcctgtaatcccagcactttgggaggctgaagtgggcagattgcctgagctcaggagttcaagaccagcccaggcaacactgcaaaactccatctttaaaaactattcccaaaaaatttagccaggcatggtggcacacacctgtaatttcagctacttgtgggggctgaggcaggaggattgcctgagcccagggaggttgaggctgtagtgagccatgatcgggtcactgcactccagcctgagtgacagagcaagaccctgtctcaaaataataataacaacaacaaaatgtttgttgctgttttacactaccgagtagcaggcagtacattttgtagccaataggcaattgaaacacagaaatttcccattacttaaattttgctgcctgatgccatcctttgaaataaaaactgaatgcacccaataaaatgaatgtgttgcaggaatatggcaaaccctggattccattctcagctctctcattagctccctgctagatcttaaacaagtcttgccatctttttggcttctggtttctcatttgttaaaggatggggctgatgtgttaaaggaagttcctatccttcttggttttttctttcctacttactaaacttccatggtttatactcatcttccatcacaacagatagcaatgaaagattggttcatttgacatttcatacttcagttaaaagaaaagaaaggtctcagctcacaggataataaatctttattatccattttgaggaagaaagagtaaaattgtcagcaattaagacacaagctaagatttgagcaaatgggtttgaaatattctaacctgaataggaagcacttttcactccaaaaatgttgtcaacccttacctacatgttctgctttggacaattacctgtcacggatgattttccttctatctcccttaggctgaggatgaaaccaagccctgtgatttctaagccaaggccttcaaagttaagaagataaataaatttgtgcactttctgctcttcatgcacctccagtgctccctgggctcgtccttttcaattgcactgatggcaactgatttcactcttgtccttgcttttcctctgggtagattttaaagcaagataaactaataaataatgaagacaggtgaagcaggcaggagaaattttgttttatcatacacaaagtgatttatgttggtcattaagaatatggatttttaaagaattttccttttatttctctcacaaatgatagatattttatggcttttgcttaactttgcttgttgttgccaggtgtttttaactcaagcctatttatgtgatgtttgtatgctagtatggtttcaacaatttttccatccaatgtaagaaattgaagattttatattcagagattgttaaaaaatattgatttcatctatatcatcttgttcatgagcactgactgtggatatgagtagcaaggatatgcatttgagaagcttacttttttttttttttttttttgacagagtcttgctctgtcgcccaggctggaatgcagtggcgtgatctcggctaactgcaacctctgcctcccaggtttaggcgattctccagtctcagtctcctgagtagctgggattacatgcatgcatcacaacgcctggccaatttttgtatttttagtagagatggcgtttcaccacgttggccaggctggtctcaaactcctgacctacagtgatccgcctgcctcagcctcccaaagtgctgggattacaggtgtgagccactgtgctcagctgggaagcttacatttttaaagcattttaatgtatgtaagcataaacactttcctttctccccctcctctatcaaatacatcccacattcaattctatttacacatatacatggttacctgatctatgacaaaagtggctttgcagggcagtaaagaatggcctttttattatgtgctctctctctctctctacatatatatacacatgtatgtatatatataatttgagcctaacacgaatatcaattccaagtgaattgcaaattgatatatgaaaggtacaataataaaactttttttaaaaacagaactaattgaaaaaattggactatgttaatattacaaacttctgtttatcaaaaggtcccataaaaggtgttaaaacacaaaccacagaaaagacacaatatttgcaatgcatgtattcaacaaaagatgttaatccagaatatataaagaacttctacaagtcaataagaaaatatgacaaggtgatctggtagaaattaacaaaagatttgaacagataatatcttatgaaagataaattcaaagagaatatctaagtggccagtaaatgtttgaaactgtgttcaacttctttagtcaccagtgaaatgcaaattaaaaccatttacaaattagaatccaccagaatgactaaagttaaaaaagacagaaaatatcaaatattgggaaggatttggagcaactggaatgctcacactctggtagttgtgagtacttctttggccacatcagctcatgctgactgtcagcatgtagtcatgttctagcaattcctctcggagtaatggatacccaacagaaagaagtagtaatgctgaccaaatgatatgtatgagaatgctgttagcaacactattcataatagtcccaaactgaaaaacaacccaaatgtccatcaatgggaaaatggaaagatgaataaattgtggtctattacacaacacaatataaaacaacaatgataatgatacacaaaacaacatggataaatgtcacaaacataataataagtgaaagatattagacacaaaaaatacttactgactatttgattctatttatgtaaagtacaaaaactgagcaaagctaatccatgtgttagaagtcaggataatagcttctcttgggagggggaggcaactggaaggtgacacagaggacgaatttcctgtttcatctggctgctggtcacatacacgtgttcagcttgtgaacacgcatcaagcggtatgtttatgtgcacgtttttctatgtatgtaataataccataaggcataaaacgaaatgcaacagaaatactaaccaatcttttggaaggttccagctcagaacgtaattacaggtattctgtctaataagtgtgctcttaaaaatgatagttaatcgcatttgggttgtttattttagtgctcaagtggaaaccactatttaaaggaaggctgaagcaaatcctttggtaaatgaataattatttctgatgacatttcagagttcagatgttcttaaagtgtgcctcttctaaaatcacttttcatcccttgactctcctatcaatgggtgcattataaaataaaatcatagttctgttcctttgggagtctaatcattttaagacctttcaaaaatttcttaatcatgactccatttttcaatgttttttcacctgcattgagccaaggtgcccagaaatgttcttttgagtttcataaattataaaagcacttagagatagaaattcaaaggcatgctctataaatatttttatgtcaaagatattatcagaaatgtgagatgattaacatggccactcaacaatttaaaagaaaaagagcttttctagtactaaatcataggacttggataaattactactgttgtcttgtgaaagcaaaatattttacacttttcaaatatatacaggaatagaggatagagtataatgagccctcaggtaccactcatgcagtatcaacatttatagctgatcttgttttttccacaacccacataaatcctcattcccctcactagatgatttaaagcaaatcccaaacatatttcatttgcaaaaacttcagtacacacacacacacacacacacacacacacacaccttttaaagaccacaataccattactaatattaattgatgaaaataatttaatattatcaaatagtgaatctactatcattttcctcattgtctcatgtttttttgttgtttaattttttattcaggatccagagactatatgttgcatttgattactgtatctcttgagtctcttttaatcagtagacttcccaccctgtctatcttttctcccaacaaaaagaaacaggcagaaaaattaaaatgagctgggcgcagtgactcaatcctgtaatctcagcactttggaaggtggagcggatcacctgaggtcaggagttcgagaccagcctggccaacatggcaaaaccctgtgtctactagaaatacaagaattagccaggtgtggtggcaggcacctgtaatcccagctactcgagaggctgaggcaggagaatcgcttgaacccgggaggtggaggttgcctttagccgagatctctgagccaagcctgggagacagagcaagattccttctcaaaaaaaaaagtaacaagttgactttagtactataattctattaggattcacatttactattgtgcaaatacagtttcttcacagaattgaaaaactagtatttccatcaaactctatgtcccaccagaagtccactctgaaatggaattatatcactatcccattaataaattgttctatcagcaaatatttattgagggcttactatgttcgacactgtgctcagcacattacactaattatttcactcaattcccacagcaccctcatgtggtagctattcccattttacagatgataaaacggaggcacatagaagttaggtaatttgtccagtgtcaatcattaggaattgagagaattggggctgaaatgaagtttatttaacatcaaatccatgcttttttttttttttttttttttgagacaggttctccatctgctgcccaggctggagtgcagtggcgcaatcatggctcactatagccaaaacctcctgggctcaagtgatcttcctgcctcagcctcccaagtagctgggactacagtcgtgcaccaccacacctggctaacttttgtattttttgtggagatggagtctcactgtgttacacaggccagttctgaactcctgaacgcaagggacctgcccgccttggcctcccgaagtgtttggattacaggcctgagccactaagccccgcctgttaaatccatgctcttaatgataacattgttctgggagcctaagcatttagaaaatactccagtattagagagtaaggggatgccaccattcagatctgactgctgtttttttcagtaatgtttcccttatgagggaggcagaaaagttaaatgacatgagtgacagcatccagtagctgataagcagcagagccaagtcttctcactctaggctcttgtttccaccatgtaaaattataataaagatttggggtttttttatttcttaaattttcgatcatcttttaaagtatttcttattcttggaagctgcagaagtaaaacaatattcaaataagtaaaattgttcagtgattattttatatgaattctttgagctggaagtgtttttagacattttagcaccactagtttgaaacaaaatcatcttttaaaggtgagttcaacaggaaaggcagctgacccaaaagggtgaattactcagagttatagctttaggccttaagttagcattgttagtccttgtagaagtttggtatatattgggccaggggccatggcttacgcctctaatcccagcactttgggaggccgaagcaggcagatcacttgaggtcaagacttcaataccagcctggccaacatggtgaaaccccgtctctactgagattacaaaaattaactgggtgtggtggtgtatgcctgtaatcccagctactcgggaggctgagactggagaattgcttgaacccaggaggtggaggttgcagtgagctgagatcgtgccattgcactccagcctgggtgacaaagtgagactctgtttcaggaaaaaaaaaaaaaaaaaagtttggtgtatattttttctaaactgggcaaggcaattactgttcacctctaagactcagcccaaatactatttcctgggcgaccttgctttgactgacccttttttgcccagatagaatcagttacaacctcacattctttctcctggcagcttgaacatgcatgtaacccacagcttcaccacagcacttatcacatggtactgtgccagatgttaaagtgtctgcccgtgacccccaccaggctgatcgttttttgaaagctaccttttttgctcttttatcatctgtcccccatgtgcaatgcacaggaggtactaaatagtttctgaatgaatgaaataaatacaacgagtccttgcttcagtattcatgtaatggtcctaatctctataatacaagggcaaggagtatgtacagttgggatggagtggagagagaagtgaacaaactcaggtccctatctatgaggcaacatagtctgacaattgctgcaaaccagaccaaacacaggcaaagatgtgggagacaggaatgggtagttactgcttgtattagcctgttctcacactgctaataaagacatacttgagactggataacttataaaggaaagaggtttaatggactcacagttccacatggttggggaggcctcacaatcataactgaaggcaaagaagaagcaaagtgacatcttacatggtggcagtcaagagagcttttgcaggaaactcccatttataaaactatcacgtctcgtgagacttattcactaccatgaaaatagcacagaaaagacctgcccccatgattcaattacctcccactgggtccctcccatgacacatgggaattctgggaactacaattcaagatgagatttgagtggggacacagccaaaccatatcactgctaatcaaggcataaagtggtagaaccactttggcaattcatgataaagattgcaccaggggaattattctgctagttcctccccatctcctgtttcctgctggtcaagtttcaccccaaagagaggggaggctggtgaagggtagagatctgataaggaacacaagatttatttgtagctcagaaacatctgcaaaatttctgcccttgggaagatttattctaataaacatttccaatcggcttgaatccatttctaaaaatactagttttttttcattaattaagtaatatatgctcactgcaaataattttaaaaatacagaaaagttgaaagataaagtcactcataatttgatcacccagagaaaatcataatattttttagataatttttgtctttgtagttaggaataaaactctgaacaatgattaaatttgaaatatacatctaaatttttcaatcatctatgtatgtttaaaatgtgtgaagtgatatggggttgtccagtgttacacaggatttctaaaattcttggtaatgggctggtataaccgaacaagatgaaagttacttgctgcgtagtttagttgaagccagacgatagtctcaatcattcataatttgaaagtcaatatatattttgactgaaaatatgaatagttgaccatttaatcaaatgttttctgttttatgaagtatatttttctagaactaaataatttgtttttatctacagagtgggtatgccaaagtcatcattgttttattcattttgacattaaattccattaaaattatgcaattttgtgggcaagtcagataattctggtcaaccaaatttttgaagacgagtaataatacactcttcacagaaaagtctagttggctataccttgaattccgagctgcacaatggctgtctgatgcacctttgagcatatttatttttgtagcaattgaaatataaaaccaagataaaggcactggtttctacttcactgaaaataaaagcaatattgatttttaaagtaatactcatcaaaccttacattattctgtttagatggcaagctgttattaacaggaactaaaatgctattcgtagcacatactacagggtcatcattaactgtgagactagtatttttgtagtctttcagacatacactcaaattaggcttggttattcctgatattttctaaactcatttgatatactttaggacgtaaatctcaaacagaaaaccagatggacccttcttgtttagaattggcaagtccatcttatgtcaatagttttttcagagaattcatttgaacagtacaatttttatttattttttttttggagatgtagtcttgctctgttgctcaggctggagtgcagtgatcttggctcactgcaaactctgcctcctgggttcaagcaattctcctgcctcagtctctcaagtagctgggattaccagtgcccacccccacactcagctaatatttgtatttttagtagagaccaggttacaccatgttggccaggctagtctcggattcctggcctcaagtgatccacctgctttggcctctcaaagtgcagggattacaagtgtgaaccactgcaccgagcctgaacagtaaaattaaatgttttcacattttgtaaaaataaaataaagcccataaatcaaattactatatattatttattttcttgtaaatttaagcatttgaggacattactaattatatccccaaaaaatatgttctttagcagggaagggtgtaagtttgaaaaacttgtagctgcagctggcagggtttgggggctaccggccatctgagttttattaaaactgctggccgcgaagccagtctgcagccaaaatgtccagcagaaacaacaagctgcccagtaacctgccgcagtcacagaatcggatcaagctagacccaccggcctgcattgaggagtttctacagcagtaaaatcactacagatccaatgtggagatttccaaattgcaaccaaataaacccagcaaagaactagcagagctggtgatgtttatggcacagaacagcctaaatgtctgcatcttaattataggagagaaagagagaaacttcagaagagcctttgctttgctacagattagtcactgctacccagagtatttaagtaattttcctcaagaggtgaaagagcttctctcctgcaattataccgtataagatccagatcttcaaatgacattttgcaaagctttgatcttgctgagaaataagaatctcatcattccatcaagcctgctagaactcttctttgaacttctacgttgccatgataagcttctgtgaaagactttatacacacatattgtgactgatatcaagaatataaatgcaaaacacaagaacaggaaagtgaatgcagtattgcaaaatttcaagtacatcatgttaagacatagcaatgcaaccgcagccaagatgtctttagatgtaatgattgaactctacagagggaacatctggaatgatgccaaaactgtcaatgttatcacaactgcacatttctctaaggtcaccaagatattagttgccactttgacattctgtcttgggaaagatgaagacgaaaaacaggactgtaactccgaatctgagaaacaaaaaaaaaaaaaacaagaaaaaatcagagatgtttaacttttcagccattcacttaattcatgatccccaagattttgcagaaaaactactaaagcagcttgagtgaactaaggagaagtttgaagtgaaaatgatgctcatgaacctcatctccagattggtgggaattcatgagctcttcctcttcaatttccatccttgtttgcaaaggtttctgcagccccaccaaagagaagtaacaaagatcctccgtttgctgcacaagcatctcatcacctagtacccccagagattattcaatcattgcttatgactgtggcaaacaatttggttaccgacaagaattctggagaagtcatgacagtaggaatcaatgctataaaagagaaaacagctcgatgttctctggccatgactgaagaacttctccaagacctggctcagtataaaacacacaaggataagaatgtaatgatgtgtgctagaactttgattcagctcttccgaacactgaatcctcagatgctgcagaagaaattccagggtaagcctactgaggcctccatagaagcaagagtacaagaatatggagaattagatgctaaagattacattccaggagcagaagttctggaaggtgagaaagaagagaatgctgaaaatgatgaagatggatgggaaaataccagtctcagtgaggagcaggatgctgatggtgaatagattgatgtgcaacactcttccgatgaagaacagcaagaaatctccaagaagctgaacaggatgcccatggaggagtggaaagccaaagctgcagccatcagcaccagccaagttttaactcaggaagacttccagaaaatccgcatggcccaactgagaaaagaacttgatgctgcccctgggaaatcccagaagaggaaataaattgaaatagacagtgatgaagagcccaggggtgaattactttctcttcaggacattgaacgccttcattaaaagccgaagtctgacaaagagacaagactagcaactgcaatggctagaaagacagaccgaaaagaatttgtgaggaagaaaaccaaaatgaatccatttcccagtttgacaaataaagaggagaaaaaacagaagaactttatgatgatgcagtatagccagaatgtccggtgaaaaaataagcattccttccgagaaaaacagttggtgctacgagatgcacttttgaaaaagagaaaaagaatgaagtaacttcccagcaagttttccattccaagaagaatgctaagtttgtgtcattactctgaaaattggtaaatcaagcatgtttgtttacattaaaaagtccagaagcactgtattgtgaaaactgctgaaaatgtggcagcaatttggtgtttttattttggagacggctaatggtgggaatgttaatgtaaatagtggtggtagtgtaaaatcaattcatttatcattcatgcaaaaaaaagtattgagtgcctgttaattgtcactgtagatataaaaccaatgagctgtaaccccttcactcaaggcattgacagcttagctgtgggggtggacacacatatgtgtatttacagcgcagtgtaaatagttctctagtagaggtagctccatatttctatgaggtcactcaggccttttggactaactctgtggggataggagttatatattcttataaaacaaaagaaaacaggacaatgttataagagtaagaggttcttacttgtacataggcttacctgctgaaaacaggcccttgttgtacagattttgggtacataatttaactcttttagtcaatacaaaagatttaagtgaccccctcttttttctttttttgaatgccatgtaaaggatttttggttaagacctcacttttaaaactgccttaagtataaatagtacctttggaatgtatttagttcatcatttgagcagccttcatactggtttcctcagccttccttcagcctgtaatattttcagcccactgtttaccttgtctcaataaaagctttctaatgcaaattggaaaaaaaaaaagaaagaaaaagaaaaaaaagaaaaagaaaaacttgtgaaagaatttagccagtttgctttaggcagacagtaagggaagggtccccggagaatctgccactggctccacagcatgagatgctttgtgcagataagggaacttgcaaagggggattgcctaaacatgtccacgtggaaaattccattccgtaacatatgcacagcaagggatataaattaatatggagtggctcagaccaagggcccacaggcacactggaaggatggggtggagccaccagaaattcgtgccttacacccttgtattcaactgtgaagggggcaactggcaacttgctttcaggacccttctctttgctgtgagctttccttttccttaataaattctactccactcactctctggtgtccacatgcctaattcttcctgaccatgagacagtaacccggacttagctgagttaaggagcaaaaatcctgcatcacttggaaaatcacaaaagaaaataaaagaagctctaactagccctcttgctattcagattgtactggtagtcctagccaatgcaatgaggtccaaaaagagaggaagagactgggtgggtgtggcagctcatgcctgtaatccctgcactttgtgaggccaaggtgggaggattgcttgaacccaagagtttaaggccacagtgaaccacaattgcatcactgcactgcacccaaggtgatggggcaagacccccatctctaaaaaccagattccatttacaataataaaaaacttataaaatatccgggaataaactcaacaaaggaaacattcaaaatatataatgaaataaacaaaaaactacaaaaatattaaataactaaataaaattcaagtaaagaagacagacaccctttttcaggatgaaaagcctaaatgttatacaggtatcaatttacaaataatgcaattccaattaaaatcttaaaggattttcatggaacttgtcaagctgactctaaaatttatctgaatccccggaaccaagaacagtgcccagcacatagtgggagtgtgataaacatgctgattgaatgaattagtgaatgaacagcttcaataccatcatgttagtccatttgtgttgctataaaggaacacctgaggatggataatttataaagaaaaaagaagaccaggcgcagtggctcatgcgtgtaatcccagcacttttggaggctaaggtgggcagatcatctgaggtcaggaggtcgagaccagcctgaccaacatggtgaaaccccgtctctactatagtaaatgcaaaactagctgggcttggtggcacatgcctgtaaccccagctactcaggaggctgaggcaggagaatcgcttgaacctgggaggcgaaagttgcagtgagctgagatcacaccattgcactccagcctgggcaacaagagcaaaactccatctcaagaaaaaaaaaaaaagaaaaaagaaaaaagaaaaagggtttaggctgggtgcggtggctcacgcctgtaatcccagcactttgggaggccaaggtgggcggatcacaaggtccagagatcgagaccatcctggccaacatggtgaaaccccatctctactaaaaaagatacaaaaattagatggccgtggttgcccacgcctgtagtcccagctactcgggagaccgaggcaggataattgcttgaacctgggaggtggaggttgcagtgagccaagattgcgtcactgcactccagcctggtgacagagtgagactccttctaaaacaaaaaaaaaaaaaataaagaaagaaaagaaaaaaggtttatttggttcacagttctgtacaaggagcatggcgccagcatctgctcctggtgagagactcaggctgcttctactcatggcagaaggcaaagggaagctggcctgttcaggaatcacgtggtgagagtagaggcaaacagggggtgtcaggctctttttaacaactcgctcttgcaggaactaatagagcaagaactcactcattacttagaagacagcaccaaaccattcatgagggatgcacccgcatgtgacccaagacctcccactagctccacctccaatattgggggtcaaatttcagcacaagatttggagggtcaaacatccaaactaagcaacctagatgaaactgactcatatttatatttctaggccagatttatcttctgaactccagatcagtagatctgtcttagtaatctcttcacttgattagtaagaaaccaattcagactcattgtgttcaaaacaaaactactatccctcttgcaaaccctgtgctcttccagtcatcaaattgagttaaggttaaaaacagagagttaactctaatcatctaattggccattcgttttgtttgtttgtttgttgtttttgttttgggacagggtcttgctctgtcccaggctgcagtgcagtagtgccatcttgggttactgcaacttccagcttccagtcaggtggtcctccagcctcccaagtagctgggaccacaggctcacaccaccacacccagctattttttgtatttttagtagagacggggtctcgccatgttgcccaggctggtcttgaactcctgcactcaagccatctgcccgtctcagcttcccaaagtgctcggattatagacatgagctactgtgccttgccaattgtccatttgtgattattgaagtcatcacaactactcctggatgcatctgctaaatgtttcttgaatctatctgtgtctctcatgtatactgacaccaccatgtgccataattccttcactattctaatgaataacttcctaaccaatctctcctcctcaaactcactatttcccccctactgccctcctgcctcaacttaaaacaatgtcagaactgcaggctaggtgtggtggctcacacctgtaatcttcctcgggaagctgaggcaggaggatcacttgagctcaggagttcaagaccagcctggacaacatagtgagacaccatctctacaaaaaaaaattttttaaagaatttccattgattttagattaattccaaacccttcatcatcacaagtttggcctggcctggctgcaacctgtatcttcagagacatcttccacagtatttgctctcgctctctactctaagctttggccacagtgaccttcttccaattcttcacatatgtttcttcctacaacagtgcctttgtatatgctgttctttctgtctggaataatctcatttttctctgattctaattaattctaacgacgcttgatatctaaaagatctctcttattcctattacgtcttcttaaaaaacagattatcaggccaggcatggtggcacatgcctgtaatcccagctctttgataggtcaaagtgggcagatcacttgtggctgggagttcgagaccagcctgggcaatatggcaagacccagcctctactaaaaataaaaaaattaaccaggtgtggtggcacacacttgtaatcccagccactcgagaggccaaggcatgagaatcacttgaacccaggagctaagattgcactactgcattctagcctgggtagcagagtaagactgtcttaaaaaaaaaaaaaagagaaaaaaaagaaacaaagcaaaataacagattgattatctcttaatagtttagttgtaagtgtacctttatgtgggtgaattttagcctttatgtgggtgaattttagacattaagctcaatcagaacaggaactatgtcttttcttttttttttttttttttttttttgagatggagtgtcgctctgtcgcccaggctggagtgcagtggcacgatctcggctcactgcaacctctgcctcccaggttcacgccattcttctgcctcagcctcctgagtagctgggactacaggcgcccgccaccaagcccagctaatttttttgtatttttagtagagacggggtttcaccatgttagccaggatggtcttgatctcctgaccttgtgatctgcccacctcagcctcccaaagtgctgggattacaggcgtgagccactgcgcccggccaggaactatgtcttttcatacttactatggtatccctagctatgacactaggagctcaacaaatgaatggaagaattgaaactgaacaggaaaaatatatgcacaatgacttgacatggtaaccaataaaggtcttcatcgaatgaataaggagaaatttttttttttttttttgagacagggtcacactctgtaggccaggctagagtacagtggtgcaatcctggctcactgcaacctctgtgaatgaggagaaacataatctggttctaagaaagtaagaatcataggaccaaaaaacctgcaaatgtaccatatttaatttcatattttaaaactatttccaaagcacaatcctagtgtttacatcagagcattcattacaatgaaaataaaaccagaaagcattcaaatatgagaagacagattcatctctgaggattatcaggaattaatttatagtagaaaatgacaaagctatttcttacgatgctcaataaagagtaaaaaaggtatttaaacaagaacttgaattcatttgtgttttaaacccttggtttcatatgctataaatattaagacaaaatttttcattatactttatcattaagtaaaaatctaatttaataaaatgttcatacatagtaaatgcttaagtaaaataaataagaatggctgataatttctcttgagaaattgataggaatttctgttttagtttttaaaagttctttaattttgataagtaacctaagaatatctaagctattatataattttaaaatagattgaaacttatttcatatgtattcatttcttacggccaaaaaatataaataaaagtaaagaagtaaaggtttgcaaaataatagttttgataatattttaagagccagtcattgggaacaaattttaattaataagctgttgataaaaactcaatccatctttcttaaatccagggaatattaaattcctttgtaataaaataatctacttgatactcatagatatatccaatgtgctgataaaaagtaaaacttagcacatctatctatttttctagtggaccaagactgttgggagatttaataaatatgccccttgtgtgtagtccctaacaccacctaagagaattataagagtatgcccagttaagttactaagcctgtaagaggacttcaaaattaagcaaatgattaaatatccttgtaacaactccactcaacttataaatttgtagttttgccttatctcagttaaatttttaagacattcttactgtttttgtttttgaaattgctaaaataatgtgtgattgtcagagtgttggaatttacttgaatattttgcctacctcccatttattgagtgtgcattatgtgcctggctctgtagtaagagcttttaattcattccattggttctttttttttttttttttttggccaaaatagcaaattttattttaaacagtagtctataaggttttttctattattattattattattattattattattattattattttactttttaaactatttttttttaattttaatttttatttttattgatcattcttgggtgtttctcgcagagggggatttggcagggtcataggacaatagtggagggaaggtcagcagataaacaagtgaacaaaggtctctggttttcctaggcagaggaccctgcggccttccgcagtgtttatgtccctgggtacttgagattagggagtggtgatgactcttaacgagcatgctgcctccaagcatctgtttaacaaagcacatcttgcacctcccttaatccatttaaccctgagtggacacagcacgtgtttcagagagcacagggttgggggtaaggtgatagatcaacagcatcccaaggcagaagaatttttcttagtacagaacaaaatgaagtctcccatgtctacttctttctacacagacacagcaacaatctgagttctctatcttttccccacctttcccccttttctattccacaaaaccaccatcgtcatcatggcccgttctcaatgagctgttgggtacacctcccagatggggtggtggccgggcagaggcgccccccacctccctcccggacggggcgcctggccgggcgggggctgatccccacctccctcccggacggggcggctggccaggcgggggctgccccccacctccctaccggacggggtggctgccggacggggtggctgccgggcggagacgctcctcacttcccagacggggtggctgcctggcggaggggctcctcacttctcagacggggcggccgggcagagacgctcctcacctcccagacggggtggcggtcgggcagagacactcctcagttcccagacggggtcgcggctgggcagaggcgctcctcacatcccagacggggtggcggggcagaggcgctccccacatctcagacgatgggcggccgggcagagacgctcctcacttcctagatgggatggcggcccggaagaggcgctcctcacttcccagactgggcagcctggcagaggggctcctcacatcccagacgatgggcggccaggcagagacgctcctcacttcccagacggggtggcggccgggcagaggctgcaatctcggcactttgggaggcctaggcaggcggctgggaggtggaggttgtagcgagccgagatcacgccactgcactccagcctgggcaccattgggcactgagtgaaccagactccgtctgcaatcccggcacctcgggaggccgaggctggcggatcactcgcggttaggagctggagaccagcctggccaacacagcgaaaccccgtccccaccaaaaaaatacgaaaaccagtcaggcgtggcggcgtgcgcctgcaatcgcaggcactcggcaggttgaggcaggagaatcaggcagggaggttgcagtgagcagagatggcggcagtacagtccaggttcggctcggcatcagagggagaccgtggaaagagagggagagggagaccctggggagaggggagatgggagaggggagaggggagagccgagagccatttcattggttcttaagaacaaccacataaggttaagaagctcacaaaagttagagtttacttaagtatttaaacctgggtctttctgtcttcaaaatgctatgccacacttcctttcagctctgtaaactgcataggctcacttattttctcaaatctgtaaaagtctgtaaaacctgtctgatgtctgtaaaacatcatcaactttaaatatgtttttttatagggaaaaagaaaaatcaaataatgtatactttgattttaagacacactccaattttagaaaagttaaatgtgaaaaagaaaacaacctcatggatcttaaaagtatctgtgctttattatctccattagcagtgagcagtattcatggtcttcgaaaaatatagaaatatagtattgggcatttagtaattgaaaattattctatttaaaatagcaacataacaatgagatgcttaaaaattaacataaaaggtttaaaacctatactgaaaactttaaaatcttaataaagataatgaaatatgatttgaattaatgaaatgattaccacgttcttgagtggaaacacttgataacccaagaatgttaatgtttctgcaaattaatatataaacctgaattgaattccaatgtaattcattttataattacatgaaatgatctataaatttatatgaaagaataaaactaaaaaatagccaaggggtatattaaagagaaaaatagtgaaatagggaattcctttagcagatactaaaaattttaagacatgattataatcaataagtgtggtattgctttaagaaaaggcaaaaaaaattagtcgaaaagacagtttagaaataaatttcccataaatgagaatgtaatatatgacaagggtggtatttcaacttgctgggaaaagatattttaaaaataattgatgttgacacaactggttctccatctagaagaaaattaaactgaacctatacctcatatcatatatatatataattacagatagattaaaacttaaatgtacaaggcaaaatgcttaggagaatatttagaagacctaagggtttttaatcaagataagaaacccagactagaaaacatagacatatttgattagagaaaaattaaagcgttttaattggtaaagcatcctatgattgaaagaaatagaaaacaatttgcaaaaaatatttgtaccaaagaggatagatgaaaggttaatatctttaatagcatttataatgcacaaagcactcttacaaataagaaaaataagaaaatgggcaataaatatagataattcaaagaagaacaaatccaaatggctagcaatatattttttaaatactcaaattcattagtaatcagaaacttcaaaacaaaataacaaggaactaataattggtaaaataaaaaagaacatagtacctattactaactggcagtggcaataggtaatgaggttatgggaaatggtactcatgaatggctggtagaattatgaattgttacagtcttttgcaaaataatgaggcaatacttagtaaagagtgcaaatctttttctgacctggaggtttcattcattagaatctaacacttataaatgaaaacataagtaggtaacaatatgtgtacaaagttattggccttcttaaaaagaatatatgtacaaagtcattgtctatgggtacagacatacaggaggaaggcagatataaaaatcttcttgtcataacctctctggcaaggtggcctctgggtttagagtagctctcctgagaagaggtagctgtaagccattagcagctaatgctcgcaggatttggggatgggtacactaggccagttcaaatgggacctgggtgggacaccaacatcttccactacaatctctacaggcatagtatgtgaccattaaagaaaggaattagctttttcagatgacttagagacttttctgaaaaaagcagatcaaagttatgtaaaagcagatcaaagttatataaaagcaggtcaaagttatataaaatgatctttttttttcttttacaaaagcatgtacaaaatttttcttcatatgtctttatataaattatctgagtatagagaaaatatggttcaatgcccagtaggtcattttttctgtttttgtttgttttttagacagagtctcactcgttgcccaggctggagtgtagtggcacaatattggctcactgcaacctccacctgtcgggttcaggctatcctcatgtctcagtctcctgagtagctgggattacaggtgcacaccaccatgcccatctaatttctgtattcttcatagaaacaggtttttgctatgttggccagactggtcttgaactcctgacctcaagtgatccacctgcttcagcctcccaaactgctgggattatgggcatgagccactgtgcccagccccagtagctagtttatatgtaatacctagtgcaggagaatgcactaggtattacatatacctatgtaatgaatgaagatgatgcaggtagaaaaggggagtagggaagaatgtcaggtctaggacaatttaaggaaaaaaagagagaaaagagactgcaccctaccaaaaaagacgattataatcaaagaacgacaataaactaagaaatgatttgataagcttggtggtaaaacctggcattggtaccttctgtccacattgggcacacagttggccttccatatggcaggttccacatctgtggattcaaccaactgtggatgggaaatatttgaaataacaaaaataaaaaatacagcgtaacaattatttacatagcatttacattgttttaggtattataagtaatctagagataatttaaagtatacaggaggatgtgtgtaggttacatgcaaatactgtgccattttgcctaaggaatctgatatccaaggaggtccaggaactaatgccccaagaattcccagggatgactgtattttgctttctgtgcatctgtagccctggagaaggatttacatcttggcagttttttaccatctgtggtgagttgaatgatgtccccccaaaagatatgtccaaagacctaagtcctgctacctgtgaatgtgaccttatttggaaacagggtctttgcaagtgcaattaaggatcttgagatgacatcatcctggatttagggtgggccctaaatccaatcactggtgtccttgcaagagaaaggagagggatatttgacacacagagagggcggtggaaggccatgtgaatacaagggcagattgtagtggtgacagctactacaggctggagaaggtaaggaatgattaaccctagagcctccggagggagcatagccctgccaacaacactttgatgacaaacttctagtgtctaaaacagagagaatacgtttctgttattttaagccactacttttgtggcaattgttatggcagccctaaaaaactaatataccaccccatttcatagacaccataagagttgaaggtagtaaaaacttaagggcaatagtttgtttattgtttgaattcatcataccacataggtgttttgctgctgcttgtgagtgacaagtcaacagatgggtacaaaactgtatcattaagaagacgtcatgtctagcttggggatgtgcggctgaacgttcagcccatgaagagaggctatgcatttgctctaaagattacctgaatatgtatatatctttaatgatgcatatgagaaaataaatacaaaaataaaaatgcatatgagaaagataaacttactgatagaaaatgtggaaggcatttcagaagcatttgactagtgtactagaaatggaaggcaatctattatataatcgtcctccagatgtcacatcaatataccgcaaccacagtgtgaaagtgctccttttcctaaacttttgccaacaatagttactatctttgccaatttagtaactgaaaatggactctccttttaaaactaatatttaaaaaaatcactgggggtagataacatgtagtctttccatttccagtacacttggacccagaaacctgaattatatttatttatcctgaagaaataatcagggatatgggaaaacaatatatacagtatgttcactgcattgttgcatatattaacacaaaaattttgaaaacaacccaaaggtttactaataccaatttattaactaaattatggcataatctttataactaaaatttcttcaggcattaaaaatgatataatatattccatttaccctgatgtgattattacacattgtatgcctgcatcaaaatatcttatatacccaataaatatatatacctactaggtacccataaaagttaaaagaaacatgatgtaataacagaatgtgtagaattctatatgtgtatgatgttcatgacatattaagtaaaaggaatagattataaaacagaacatactgtatgatcatctttttggaaaaatccatgcagaaaacaaactgaaaagatacatagaaaatgtaaacactgattatctctgaagatagcaggaatatacttgactttagtgtgtgtgtgtctgtgtgtgtgtctgattcatattttcccagttttctattacaacatgtttaacttataaaattaataattaaaaaaaaaaatctcggccaggcgcggtggctcacacctataatcccagcactttgggaagccaaggcgggcagatcacatgaggtcaggagttcgagatcagcctgaccaacatggagaaactccatctctactaaaaatacaaaattagccgggcatggtggcacatgcctgtaatcccagctactcgggaggcggaggcaggagaatccttgaacccaggaggcggaggttgcagtgagctgagatcgcgccattgcactccagcctgtgcaacaagagcgaaacaccatctcaaaaaaaaaaaaaaaaaaaaaaaaaaaaaattctccctggctagatgatcaacttgttgaggccagagactgtgaacaaatttctgtgttgttttttcctcttctcaccgccaaatacgcttgactatcctatctgcaaacagaaagggctcaattaatacttcccaaaatcaaaccacaatactagaaacaaaatcaagatggctaaaataagatgtttattataagtattttctcaaagagaatttttaataggagattgtcaagctgttttatttccctctaaattcacacttcattacaggtaatatagtattctatggattttagtgcgccaagactaatcgtctctccaacaaacagcttcacttacatttaggaatagttttcagggattgcattctctttcatgaatattactatattcttagtaaagcagcatataaatctacttataatccaaaagtaggctaacattgggtttaggtgcatctaaattcaaattctgtagatgattggcaaaaacttccattatgggatacaatagttactaaatggaagcacttagctacatgaaaaaaattataaagatatcagatattcaaaattgacttttccttcagattaagagatagctttatttagacagctgaaacagggccttgtaggagatgtttagtctctttgactattccccaaagattatcaggaaggaataacctaactaattgtatgttttgtcaaggcctgcattgattttttacatgataattttaaataacctgcataatgtatgtgatggtaaacaacattattttattttaaagttatccaaagaactgctcaacaatatgaacaacaatatgaaaatacatagtacaatggctgatttatggttacttcaaatttcttgtctacaatgtaaatgcctaagtagctttgataatacaaaccaaatgagttcaaggatacctataataaaagatattaatgtgatatagtttaaatatcttgtgtaaaatacttcacttacataaagtgcttcagtctaacagttgacttacaatgtctaacatataaagactctctaatatggtacaaatggaagaattaaagggtaggatatctataagaccaaataagtatttgattaaaagtttcctttatttgctgtagctctccactttcttccttgctgctaaaatcctaatgccttttgattaataagatgataatcctgttggactcctatggttgaataacgtttaatgttacatgtcctgagagtcccacgaaattattgagcagctgtcaccgacttcattttcttcttcacactctccctttccttttccacagcgatcacggtttcccattctctctcctgaggtacttcataatgcaatattcagacctcaatcttactttaagtcacaaaacactgcctgaggcttaccttagttgctatttttacttatcatttatttctgccaaaaggaactcctctaaaattattttcatcaagaattttcatttcatgttttatcatctaagtttgaacgctaattttcttgaactatagaggaaggttttttttctctttttttctatttccagtgttttctgctagggattattataactttaggaaacatagaggtatttgtaaatatattttaacgaatttgtgatatattcaaaataagagcattgatgtttcactaaggaatgtaatcaaattgtatggcaaagctaaaaatgatagaatttaaaaagtggctatcgtgaaaagtagaagcccctaatctataagatcaattggagaggttcgctgtgtcaccccttcttggaggaacttgaaaaaatgcaggataagggcaaagagaaccaggacaatacccaactcctatgtgacacattgtaaacacatgtgataaagaacccttcttttaggttggggtgatgataaaaatgcaaaggcatggcatcaagaatgcttttttccatttatgtgaccaagttttcagtaaataatttattacaaataagcttttcctcctgcctttattagatagctattgctgtataagaaagtacatcccaaatttgacttaaaacaacatttattatctcacagattttgtgggttaggaaccaacctgggagtagcttagctggcttttttgcatcagggtctctcgtgtggctccagtggtagggctatactcaactcaaggttccactggggagaacctgcttccaaattcactcttgtggttattggtacgattcagttccttttgagctgttggctagaagcctccctcaacccttgctatgtgggcctccccagggggcagttcccaacatgacagctggcttccattgagagagaaggcatcaagagacaaactcatctttttaccaccaaatatcagaagtgatatcctgtcccttctgctgtattctattcattagaagctagtcattaggtcccacctacacccagagagtgaaccaccaggaagtgagattattgggaaccatcttagaggctgcctaccacatgcaaaatacgtcccccctactcctcagatcctcaaaagtttcacttttgcattacaacatcagctcaaagttcagaatctcataattggaatcaagtcagggtgatatcataactggaatcaccccaggcttcctcaggaggtagttctttaagtacagttcctggaacacagttgctttccatctgtagacccatgaaactagagaaaagttatctgccttctactcacagcataaaattatggataaggcataaccataaccatcaccataacattctgtccacaaagctgggaaatgggagacataaaggagtcactaagtctagcccatgctcaaggggaggaaattatgcaaggtctgaaactaggaggtggggccaccttagaggctgcctaccacactgcccttctatttgattgtaataataaaaggagtaaaacttttgataaatattttatgagacttcaggtggggctgatacctaacatatatggatggcattgctgcttgtattgctagttttttcctttggctcagagtaaaaattctttttgattacaagaatatcagaggaaattgtttaacaattctatttctctttatcatggctatagatctgatcattgactattaggttggtttgtttcccaaaaatttccaaaatattttcctaaagtttaatacaacatttgttatagctccatgcttattcatgtggctgccttctatatttcttcttcaatttatcaatacatcttatatttgcataaaattcaaactacatcccttggtgaaacataatgtctctactttgaacatgggagattttctactttctttttcatactattgactagagaaataacttccccttccctttatgctgctttctgaagtcctgctagaatactccttattgtccttcctttttctatcagtctatggttctcaaccaacaacagttttgctcttcgggggacatttggcaatgtctggaaacatttttggttgtcacaacaggagggtgctactggcatctagtgtgcagaggccagggatgctgctcagtaagctgtaatgcacagggcagcctccgtacaacaaagaattatggggctcagaatgtcaataatgccaaagttgagaaaccccagtgtaaaacaaaccagtccttcttcccactttaaaaatgaagacattacaatgttgctttagccttggttactatataaatctactttttccccccaaaagcaaacatttccccaaaataacaaaaatgtggagttgtgatataaactacaaattgcaggcaaaccaggttctactcaattacctaaccactgaagaatatagcttgagataaagggcatggagaaaagtgaaattttactaaatgtgcagtttgaatacttcttttgattgagcaatatatactgaatgttttgtgacactttgagatctagttttatactttaagcatatgtaattactgctaactggaaaatatctaaaatatgtatatccaaactagagcatggattaggagtcttttttatttgtttgctctcaaaatgatgccaacataacaaaaatttagaacaatgtacagcagccagtatagaatccctaagataactataatatttttaaataaataatgcttcatatttttattgtttcatggcatttccattcacgaatcaccttttttcctaaataagtgtatctataattttatgagtcatttgtccaaatatgtagaacagggctttgggagaaaacaaatacactcacaatttttctcaattgccaacagactagtttatttgtttctcttgtaatacgaacatgctattctcttagtttttatcttcaataacatatgaaagatccaaaatcaaattggctgtctctacagccacctgtaggccactaagctttgcagtcaaacagtccaaggtcaggttgctggctgagcccacagcttcatgtggaaggcagctttgtggcacaaatggacgacgtgtgcttcttaagaaagaccagttgagttcttcctggctattgtataatccacagccacactgtgaaagcaaatctggccagttagcaacacagggagaatctgcctgaactgaccaaaggtgtccatacttcatgtcagtgagaatttcacctccatcatgttctaaagagccaacaacagattctagggcactgcaaaatgcttcagcaattaattgaagttctgtttgagtacattcatcatctttgagaatgctttctgggtcgttgtgagtctaaagagtaataaaaacattgaaaacacatacaaagcaattaatataaaatgtttcagaaaaataagatactgaaatcaaaatcttattcctaaagtaattacttactttcatttaatttggggtctggcacaatgctaacgggcttgtatgggtcagccggccgggttgcaaacccttaactaggttggttatagtaaaaatgtattaaaaatgtatatactaccagtcatgttaccagaatgagtgaatcagaataaccccaccatcagcttattctgaatgaggcttggtagtgcctccttaatacatgaaggactaggcataatacatgtattacaggtttttctgcacacaggaggaagttcctgaagactgatgtcccaaatggagtacttatttatctctgcaaaatgtttgagatttgcttaaaatgggaatgcacatatttttatttggaaatcatgatgtaaattttcatatcaatgttttaaaaatgaatattcttctctttaaattaatgaaaaggtaataagaccttaaacagtcttctggttccactatttaaaaatgtttatcctagaaattccatgataaaaagaaaaattaatatatagccatgcaccacataccaacacttcagtcaatgatagactgcatatacaacagtggtcccataagattataaggccatatttttactaaccttttctgtgtgttgatatgtttagatacataaataccattgtgttacaattacctacagtattcagtacagtaatatgctgtaagggtttgtagcctaggagcaataggctataccacatagcttaggagtgtggtaggctctaccatgtaggtttgtgcaagtacactctatattgtttgcacaacaatattgtctaatgatgcatttctcagaatatatctttgttaagcaacatgtctgtattagcaaactaataactgaatgatgggttaaaaaatccatatcttaactgcttaaaaacagtgactactttcctactcaagacacctccttcctctaaaaaactttctctagtttatcaattccatttcagaatacattattgtccattcagcaccaatagattggcacaaattttgttttccataatgtatattctgataacttttcatgaatgtgctttatcttcaaagagattctaagttatttggggaaggacagggcatgtttacccaatgaatcgattgctaatatctggaaaacacctatacctttttctatccattttcaaataaagtaggccagtacttatgaaataatcagaacaacaatgcactaaacttatctgagagctgtcaggaaatggagtttcctagaccaatcaaaaaattctatttagtataattaataaataacatacataaataccaattttaaaattataatagaatctaatatgtgaattgcttaaataaatgaaacttttcttgatgctctagaagatactgaagtattctgtagaaacttggcccttttgtttgtgaacatcaattattactgtattgcagcagttgagatctctaagagaactcccaataacagaatgctagcttcaacatgcagaacatgtagacaatactcaaagaacgtgatcgcttgcttaaatatttttataataatcattgtaataaggatattaccttatatttaccttgttatttccctcaagtgtttttgattatctactttatttagactactgaaaaattcagtgttaaaggctacaagtttacctgtataacaaacctatacatgcacccctgaacctaaaagttaaaactaacaaaaagactataggatattatgattttggcttattatctcagaaaacaaaagttgctgagaattcaggtaatccgaagaggattatcttacataccttgtgtctgatatatgcagccaaatgagtttcagtacagccacctcccaacaaagcccatggttccttgagtgttaactgcaggacatgcagtgccgtctgacacgtgagctaagaaaaaacccaaatcatcagaatcagacgttcacatcatattaacacacaaaaaatcatgctctcaaagcatcatagtgaatacagagagtgtgattttaattacaaaagaacaaaacttgtgtggtgccaaggttgtcatgtgattaatacattctgaatagtaaggtttagagattaagggaagatacttcagtcagaagtttgttttcacggagccagattagtattttctttcatatacacttagctcttcaaactgagacgaatatatggcctcaaaatatctgggtcaacaaggtttgctgacacttccactaaaaaaatcatttcagtctaaataataaatttattttgaatggatttggaaataatacagttacatcccagcaataataaataaaaaatcacacagacctttaacatttactaaggatatatccttgagcatacatgaatctttaaaacttgtgaccaatcccatagattatcatttcccttgtataaaagttgcatgtattattgctggcagagaacaggaaactctgctaagaagtggatgatgggtattgactggggaactcatttttccaagtgaattattcatacacattaccatcaaagactacacaattcaagctaatttcttagaaaagttcgcatgtcaagggccttttaggtttctagtaaatagtagaaataataaatggcaacacatgccaaatttattataatgccacaggcatttaaattagcttacttgtgactttgcatcaatcattttaatttttgctttctatactacctagggaagctacgaaaaaaaaatcataataactattgagtgactaattcctccctcagcctctgcatatggaattcaaagttcattacctaccttcagctcatcccaggcagtgtcatttctgttgcagagaagcaagctgcagattgttgcttcattaggaataagatgaaaaaaatgtttggagccaaattttgcagtgcacacatctttcacacttccataactattaggacatattgagcctagggatccaataggctgtgttcctattttttaaagattagaaaatacaagttgtataagcaaaagtggagcaaacaaccatttaaaagtatatttattcctagccaacataaaagccccacaagcatataatttaaaatatgaaatacaggataaataagatgaatattcctaaactgctaagttatattctgctattaaaatgatatacaaataaagtaaagtagaagttatttttgtttacagatctctttgaaaatcttttagaagtcattttgtactgtcttcccagaaaagggcacatacaattttgcatacattttcaaggaattcagaaaaccctcaaagcccattcagggtttagagaccccaaattaagaacttcactaatttggattacgggtgatgtgacaggctatttttttttaaaggcattattattttcaatttaaaataaatgctgctatccaaatagttgtgtagttgaattccttcgggacgctacatagtgaatatgtaagaattatttttttgtctggcaactatttataaaatagctaactgaattatgccaaaataaagtgacatgcttatttcactgctattatttgatatattaagtattttgtcctcctacctgcacatgtaaaatagtgaagttttataaaccacaagtaaaaatatgaataaagaagttagcgtgacttgaattttccaaatctccaaacgtaatggaagttatgtaagaaaagaaacctacatcaaactcctacaagaaacaatactaaagtctaaagctataattctgagccattcacccctttcagctagtttccttttctttcagactcacctttaaaagatggtttctttcaaactaatggggtttagtttgaaagtctaaaatgtcggccgggtgtagtggctcatgcctgtaatcccagcattttaggaggctgaggcgggcattgcctaaggtcaggagttcgagaccagcctggccaacatggtgaaaccccgtctctactaaaaatacaaaaactagccgggcgtggtggcaggtgcttgtaatcccagctgcttgggaggctgaggcaggagaatcgcttgaacctggggggcagaggttgcagtgagcagtgagctgagattgcgccactgcactctagcctgggcaacagagcgagactttgtctcaaaaaaaaaaaaaaaaaaaaaaaaaaaagctaaaatgcctaaaaacacttccatctcaaaaaatttatagaatataatcactaaacaatttcacttatttgaatattgtttacttctgaaatattcaagaataatgaatactttaaaaaagtgatctaagtaaaaaacccaaaatcttatagtataatttctttcacatggtgggaacaacagattctgcatgagaaggccggctctactgcttatcagccactggatgctgtcactcatgtcatttaacttttctgcctccctcacatgagaggcaagtggggataataatgcatacttcacaaataaatcaaaccaagtcaaatgttaaaaatgctccaggccgggcgtggtggctcatgcctgtaatcccagtactttgggaggttgagatgggtggatcacctgagctcaggagttcaggaccagcctgaccaatatggtgaaacctgtctctactaaaaatacaaaaaactagccaggcgtggtggcgtgtgcctgtagttccagctactagggaggctgagacagaattgcttgaacccaggaggcagaggttgcagtgagccgagattgcgccactgcactccagcctgggcgatagagtgagactccaccttaaaacaaacaaaaacctctgtaagctgcaatatgcttcacatgtggcacccatccacagtaacacccactacacaacctatatcattaataaacaggaattttgtttgaaggcctgaaatgaggtaatgttaacttagattaccaggggagataggtaaggccaaaaacatacttcatctacctaaaagtttacctgcgctatgtgcctggtagttttcccccttttctttttttctcaaaagctctctgctcccaagatccaggactaaagctatggctattaatgccatgtttaggtatatattatgggctagtgtggaaacccagcccccagttacaatatggtttctacgggaaaatgtttggtttttttttttttgatagggaatcttgctgtcaccaggctggagtgcagtggcgcaatctcggttcactgcaacctccacctcctgggttcaagcaattctcctgtctcagcctcccaagtagctgggattacaagtgcggccaccatgcccagctaatttttttgtatttttagtagagatggggtttcaccatgttggccaggatggtctcgatctcctgaccttgtgatccgctcaccttggcctcccaaagtgctgggattacaggcatgagccaccgcccagccctttctgtttttttagatgtagtcctgctttgttgcccaggctggacttgaactccttggctcaagtaatcctcctgcctcaacttcccaggtagctgggactacaggcatgtaccacacccagctaaagtgtcccatattttaaaaatgagtctggaagacccagtattcacaaactggaaattgccagattcatgcaaagctagtagatatttaaggctatcagtctgacttaccataccaacaacgagttccaaggaattatttccattattaagaaactctacttttgacagtcatttgagtcttaccaaggtagggcaataacccagagatattatgtattcaacacttggcatacatatggctcctttttgataatttatactaagacttttattaaataaactttaacaatggtttaagtctagtaacttaaaaattggaaacaatgcagactaaatgatcatctttctgatagattgtcaaagcagttaaaggatactgaaaagtagctcacatcaggaactcttcagcttgtcatttttctttggctctaacagtacttatatctgcttttaatttgctgagtttgtaaaatacagtgaattttttgcctattttagttctgtatattaccaaatatatttcggtcaattcaacaaacactttagaacacccacagtgggccaggcctgtaataggtgctgaaagtaaaagatgatcttggttctcaaggtcaggtgggaacagttttgatataggtaaaacataggtgcatgtacatccccctcccattagaaacaactacttaaggagaagtacagaagtttgctggaattatgacaaagtgaagaaaaagggtcattctagttacaaaattactttctaaatataacatgatttaaaagttttgtcaattgaggctgaagaattttgtgtaaagtatgaaagaccttaggattatggggatgttagacttctcaataacctgtaaaatatttgggggttagatgatatagtacattagggggctgaaaatacatagaaaatggctataatcactgcatttttagtatgtgaacaatacaggatcttttccagaaacctttgctgccagaaatgatactgacacatgctgggtcaatttttcaagatgttaacagtgacacaaaccaaaaatatctctgctcaaaaaagtgtgatttattaactgtaagaggcaaaagcaaagagtgatttttacctgtcattttagtcaggggttccatcagagtcactccaattctgtctatggcaataatacgatgcatattgagaaactgcttcaaagatggatgtataactttttggcacaggacaagatctacgtggtcactgattagctgccttcctaggttaagcagctggtccaagactgcattttcaagagaaaccccataactgaccaccacagttccttctccagtgtcagaagtgtctccggataaagttgtacaaaagagtgccaccttgagggcagttgattttttgataggtaatagcctcattaattgaacttctgacatttcaatgagtatcccaggtaatacagtggaatctataactctttgaccttttaaaggtacaattaaactctttcctaaaatgatgtggccttcagcattttctggaattgtaagcaaaaaggctctcaggatcaaagcactgacatgctctgtttcctttctggtgagcatacaggcaggtttacttgttaatatactacgcaccaaacaaaggaggatctgagtactactaaagtccactgggattcgacaaccacaggtctcagacttgagataactgatgcaaagactcaaaagatgtttatttaatctaatgacagtggtgggtgtcaagcctaatctctgaacattttcaatcaggttgcagcaaagaatagctgtgaataagccacaatcactgaagcttgacacatgattctgtatggaggctgtcaggatctttaaaatgggatgtgtgaccaaaaggtgactgagcagagctgaggactgtgaggttgtacacacgtaacctccaaagccattgtgcagctgcttcagcctacctgaggggccatagcatgatgttacaattcttttcaagacagaaagtgtggtcctgactctctcagttgtcagtggttcactcttacacaatgatggcttcttagcttccaaacgagacatcttacttcaggtggtaactagtgaagaccgtttttattttgtaaaccacatttttctatttattgcattatcacgttttaacattaaaaattattctttaggaattaaagtatgaatatgcagcattgtggctataaaatcaaaaagttcaatgtttatgaagctaatcagcatagaatgatttaatgacaaattagtaattccaaatatttattttacttcactcttcaatactcttttgtttgctttgagactgaaattttacagactgctttgcagacctctgcaaaaagtatgttccaagatggacacctatgaaagatatcccagctacaagaagccagttctttctaatccaactggtatttttcatctcttctttcgatatgaagctcagattcaaagctgcttctttacctaataaataataaaaaaaacattttagagaaatacttcccaagcagtttgtagactgcagtttaataatttattctaatgctctgctgcctttttagaaaaaggaactactaactggcacaaacgtccagaaaatgagaaaggtagaccaactttgacttaaaattcctttattcttcaataaatcccctctacaagaaaaagtgcttgtatttcagtgattctgtaaggcacaacaacatggctagaaagcttacagcacagttatttgaatatggcatgcttctaggagagaaatgctacgatataaaacagagaattaggtctctgagtctttttttttttttttttgagatggagtttcgctcttgttgcccaggctggagtgcaatggcgtgatcttggctcaccacaacctcagcctcctgggttcaagcaattctcctgcctcaccctcctcagtggcagggattacaggcatgcgccaccatgcccagctaattttgtacttttagtagagatggggtttctccatgtttgccaggttggtctcgaactcctgacctcaggtgatctgcccatctctgcctcccaaagtgctgggattacaagcgtgagccactgtgcccggcaagtctctgagtcttaaaagaagtcccaaatatctttattctccaacatgaagatttaatattatgtttttatctataattgtggtttgcttggaaactttaggtttgaacagaagtgcatttatatcaagtcatgtttgtaaataattataaaaacaagatagctgttggcatgtctactgcaggaactcactaatgtatagtctatatttagctgaataattctgcacaacacattgtaccaaaaaacaaaccatgttttaaacacctggctaaagtcagagctaattttctatcattttacgttatcaatcaatgattttcagttttggaaatcctagtcaacgaatcctccccaaagcactggttaatgacagtacatgcaaaaaccaagggatatgctggataacaacaacaataaaaataggatctgagttgcaattcaatttcaaagtctaaataccataaaatgttatatatcaaaaggacatgtagaaatacaattctagtttccttaacaaggtagtgtccttgctaaaaaaaagtgtgccttgaggcataaattcctgacacattaataataatgtgtgaaaagaataaaaacgttagatcatagatcttatctgttgaggccgggtgttttaaaggtatattattcgttagtatttccaggaatatgctgagtatggtagtgtccaggagagcatttagcataaatgaaacaaatctatttagcctaaagtacttcctaaaagtaggctacagcatagtatggtgatcagaccaaaaccttgatttgaagatgtgcaaagaggtgggcagaacaagggaatgttatgcaaatgttattttggttaccattcccaatttagctaaagggctgtaaccatggcaactgggcccaaataaagggcaatgatggtcagctttcttcctgtggtgataaagctattgtcaacttttgtatggcatgaggagggaaagaaaaatctgtttattgatgccaggaacagccaaggtacttaaatatttcaatggctattacagattcagcaaaatctgagaaatacatttaaatgaaacctcacaaagtgacttctatatgttaatttgcacgttaaaacttacatacacaccccacaataaaaactatgattaagaaaatcgtttttctagttagaacattttcaatacttaatagtgtcatgtaacttttcaaaaacagaatgccatgttggcacctctgtcagtcttacagtagtgagaccagtacacatatcttttggctagtatttcattaaaatgacaaagaaatcactgaaagtggtagtgactcccaaatcattttaaagatgccaaaacttgttgacctgtggtcacaggtctagacctgaacaaaagaaggtacaagaaagagaaaagagaaaaaaaaaccaaaccactggggctggtttatagaacatgtttggaagtatcagttcagctctattaaaactctttcttcctaaacaaggtgctccataattccaagagttaccattagacgaatggtcctgactattcttggatgcacgggcttggcagatgggtttttgttgttgttgcagtgatggataacttaattaaaataacagtaaaacttgcatgacttcttctaaattaagaggtgcactataaaatatgatttaaagaaaatacaaacaggtgaaagtttttcctaaaagcaaatggagttctttggcaaaaagaatgattataggtatgaggtaagaaatacacaaggtaagctggggtccttttctgcccaaaagtaaggatgttattaaagactacgtgggtcatatcacaaggacaaaggaaaaacaacaacaggagtcaacttggagaggatccaaaatgggacaactttagcattaaaaaaaaacatgacgacagcaacagattaatataactgaaataaatgcaaacccacaggttcatactaacaccaaaaacaaaaaccctaagtggcttgagcactcattattataaaaaccaataaagggaattacagggataaaacattaatcttgctttccttgtataaatgcattttggggtaactgaatagttgacgatggaaagttgttccagctaataaatggagaaggaatgatagaatttgagcagcatcatttggcaacccctaatgaaatagtgcattagacccatatatggtggttggtaaattaagcctatggaccatatccagactgctgcctgtttttgtaaatgaagttttattggaaagcagccatgctcattaatttgtgtactgtgtatgagtgcttttacactacaacagaaagctgaagggttggtatagacactatatgatctgcaaagcctaaaatatttactatctgatcttttatagaaaaaaagtttgccaatttctaggttacagcaatgataatgaatagtcgctaataattattaagtaaaagatcacctggccaacatggtgaaaccctgtctctactaaaaaaatacaaaaaactagtcaggtgtggtggtgggtgcctgtaatcccagttactcgggaggttgaagcaggagaatcacttcaacccagaaggcagaggttgcagtgagccgacatcacccaactgcagcctgggtgacagagtgagactccatcttaaaaaaaaaaaaaaaaaaaatcaaaggggaactttataatggaaagaaacactgctaacttgcctgttaatcttagcaacactggctagacgcagtggctcttgcctgtaatcccatcactttgggaggccaaggcaggaggattgcttgaggccagaaatttgagaccagcctgggcaacacagcaagaccctggttctaaaaatattttagaacttagccaggtgtggtggcggatgcctatagtcccagctacttgggatgctgaggctggaggatggcctgtgcccaagagtttgaggctgcagtgagctatgatatgttactgcactgtagcctgggtgacaaatcaaggcctgtgcccaagagtttgaggctgcagtgagctatgatatgctactgctactgcactgtagccttctctgtaaaaaaaaaaaatcaacatcatcatcaaaagtggatcagacattatatatgaaacaacatgattacctaggatctattccacagtaccatccatgaagtattcttgttcaaaaagtaaattaaaaaaacaaatgaaagtagcctcttgatataattacgagattacaggaaataggggagagaaagaggaaattgttaaatgacaagatgaggaagcaatcagccaaactgagaatgtgggaaattttttaaaaggcagatttaggaggggaattgaaaagagatattatctatcaaatgcaatacgtagaccttgtttggatcctgattccaacaaaccacctgaaaagattttttatagacaaattcagaaatataaacatggccttgggtatcaaattgtaggtaaagagtcactgttaagtttttctaggtgataatgcaaatgtgtttgtgtatgtgtgtttattcttactgttaaagacacatacaaaaggactacatagtggagcttaagatttgatttaaaatattctagcagttcaaaaaacagaggaaaagatggataaaagaagactggcaaaacgctgttaactattaaagctggttgtggcgaaatgcccttaactattaaagctggttgtggcaaaaggccattaactattaaagccagttgatggatacttgagggctcaatatactatcctctctttatcttgaggcatgtatgtaattttccataatgaaaataagaatagaaaataagagacaaataaatgcattcttttgatgtacttcaactattcggaatttgtgtttaacttactctaaatccggctctaacttttgcttactaaaagcctgtttaaatatctgcttctgcttgcttgactggaaatgttagcctctaaaacttttaactattgctgcactggcatctaaaatctcttactacattcacctaacattttagaggagattcttttctcagctctatttttcctccaagagtatttctttttgcatgagaagaaactacttgattttcttcctccaaagtttggccatacctggcctccaaactgttaagacatctttttgttctttacttcttgtcataagtacaatatacatacataatataatggtcttactagtctgaaagactatatatataaaaatccagcacctaataaattctctaactccctgcttatatatattaaaactcttcctataaatacaaattttatatagaatgtcctaaagttactcttttaagttgttaagcttctatgttactacctggcttttatatttaataattgtctaatatattaagctatgctcttccacttctgcttatgaacatttaaaagtaaaatcttgatttaaaatattgttgaaaccagtaattataccaaaagtcaaaatctcagaccaaggcttataaataaggaaaatcttactgaggttcttcttccataaagagcagaaccttacactcatctatcttataacaaaacttagagcatattattcacctcaaggttaaaaagtaaattataatagaaaatgctttacaattacagggtcacagttctttatctgaaactccttgggccagatgagtttcataattcagaatttcttagattttataaatacaatatagtgtatataacatacataatcaatataatcataatatagtataacgctatattatagtaaatcaaacgtgacaaatgccaataaaatttctgcagtgaaactcaattttcatattaagtggaataaaaacagtgacctcccccatttatctatgagggatatgttccaagaccacccagtggatgcctgaaactacatatagcactaaaccctatatatactatgttttcttcttgtacatacatacctatgataaagttcaatttataaattaggcacaatactcctgtgctttgggtacattgtgaagtaaagtaacagttacctgaacataagcgcggagataccaccacagttgatctaacccagagtgctgctaagtgactaacgagcaggtagacagacaagggaatgactcacatcctgcgtggatgaagtagaatatcccaggatttcatcatgctactcagaaaggtgcataatttaaaatttatgaattgtttatttctggaattttctatttaatattttcagactagggttgactgcaggtaactgaaactgcagaaagccaaactgcggataaagggagacaactgcactgcaaattgcctcatgtcagttaagatcaagttttgctgtcaaaggagtgaggataaaatgttttggttttgagaactttttgaattttggaattatggataagggactatagacctaaattatataacttcatcctctttatttcagtgactctcaaaagtaacaaattatggtcaagctaaaatagttgatgttaagaaatgaatacaattagttttgtattgttaaaaaaaaaagaacactaatagaagaaaataatcttgtataaatttggacttttgtgatatgtaatggtaaggagtcaggggctcctttgcacacattcatgatcctggtgatgctgctagcaaaactgctctttccctttgcattcaattgactgccaggcaagtgtcaaatgtctctgcacaacgaacttttctagaaacaactgcagaatagtattttgccagtgggtcacaataaaaacaacaggtaacttaccaatttaggcttttccttgccagagatctaaaagattgagtttcccattgttggaatgtgccatatgattaaccaaccagattaaatggaacttacctgaagattgcaagcctgctacttcccctggatttggctcttctgaagatttgaaagtcccagactatcttgctcaggaatgtcgtcgtttttaggtatttggaaaacagggctgcttttgattctgtaccaccccaaatgtatgagcccaactaaagggaccataacaaccaaaactttgtagtctctccacaagttccgaaggctcatagtacttcagcatcagtgtacctaagaaaaggttacagttagaggaaaaaaaccactaaaacccataacctccctttaattacatttctaaatcactacaagtagcatgctgtactctaacaaatgctgactgttaaacattttaaattataatacattgcaatgttaataaacaaaaagagacatgtcattgacccaaagggagcaggcagtcagccttgggaaacttacagagcaatactgactttttggcaacaattgcaaaggagcaacattacctgctggaaaagctatatgaatctttgaaaacacacatgcatggagtgttctttaaatatattaatgttctctgagccacaatagagtaagagcctttttttaaattatattttttaaaaattataattacaggctgagggtggtggctcacgcctgtattcccagcactttgggaggctgaggcaggcagattgcctgaggtcaggagttcgagaccagcctagccaacacagtgaaacatcgtttctactaaaagtattagtcggatatggtggcgcatgcctgtaatcctagctactctggaggctgagtcaggagacttgcttgaacttgggaggtggaggttgcagtgagccaagatcatgccactgcactaggcaacagaatgagactccatcacaaaaaaaaaaaaaaaaaaattacatttagtcacaattttaacagaagaatcaaacggtaatccacaaatatgcagtaagaatttaggttctatattctgacaggatgtagtgatagtgtttcaactgcgattgcaacagctgaacatggattccaattgcagtaaaagatttctggcttgaacgctacaaatcagaatgaatgtaatgccatttccacatttatgtgcaaaactactgcattttagagtgtttgccctgaatcactagaaaaccctaacttacagggttatcgacctagtttagacaaagaaactggggctagacagttgcctggagttacaaagttagttagcttttaaaatatatatatatatattttaaatttggaaaggatggaagtagggcccagaaagatgctatgtttgatgatctgttgggtttgggaacttgaatctggacaacctctaaagactccttatactcttaataaggactgctccaccatctatgagacatgctatgaacttggctcaattgcatctctgagttttagtaccatgaaatctcctaaattactttatttttgtctaaatgccattagaaaaaggtctgaaaagaatttcttattcccccttttaagaccaaaacacaatagtactgagttaaatagtctgaaccatctgtgttctgtgtatacatactaaaaataataaaagatgttatcttatagctatgaacatgttattcttagcattataaatcatttctcccaaaggtctcaattcatattttataaggactttgtggcaaaattttaattactagatagaggaaacacgacctgctttgtaaatgaaagtattttatggccttttccttttctaacgtactgtggtatactatatactttttgtaacctttagagaatacaccttttattgacatgcttatgttccatttttagagggaatcaattacaaataactgtatcataattaaatttcattgtgaagtccaaaggcaaaagcctttgggaatttaagggtacaataaaataactgggggaggaatttagagtaaggagggaagaattctattaagggctacttacttataggagggacagaggctgcaccaaaggtcagctggcctgtgttgattgacatatggcattcttgtttgcaaacaccttaactaaaggcctagaagatactgttatttatatccagtctcaatacttaaggtgactttggcacctctattcccctcaacatgaggttatcaagttatattatcttttttttttttttgtgagacagagtcttgctctgtcacccaagctgtagtgcagtggtgcgatctcagctcactgcaagctccgcctcccaggttcacgccattctcctgcctcagcctcccgagtagctgggactacaggtgcccgccaccacacctggctaattttttgtatttttagtagagacagggtttcaccgtgttagccaggatggtctcgatctcctgaccttgcgatccgctcgcctcggcctcccaaagtgctgggattacaggtgtgagccactgcgcccggcccttcaagtcacattacttttaagagccatttctgccattcaccatttacttctccatgatcattaacataattcaacatttgtcagcttttttctgaactataaactcaaggaaaaaaaaccctagcttataaaaagagattagggccaggtgcagtggctcacaaaagtgtaatcctaacacttcgggagcctgaggtgggcggatcacttgagcctaggcaacgtggcaaaacccgtttctacaaaaaatacaaaaattagctgggcatggtggcgcacgcctgtagttctagctgcgtggggggtgctgaggtaggaggatcgcttggaccttgggaggctgaggctgcggtgagctgagataacaccattgcactccaggacaggtgatgaaatgcgatcgtttcaaaaaaacaaaccaaaagcaaaaaagagactggataggataaaaggatgtaataataaaattgagatttgtaactcaagaactaaaattaggaacaaattaaatgacaatctgtaacactaatgtttggggaagtgttgtactattctctccagcaaagtggttaacagcatgtaatgacatagtatgaaccctctttgagaagagtgaaaattatatagggttagctccctataatacttagtgaatctttaggtcatctcccagttaaagataaaagaaatgctcaattttatgtatattgtgcttaacagtctattactctttccattaggataacttaaggatcgatgaatctttttctagatttaggtttagttaaacctggaaatcagtatctattttaactgaaaactctatttgctaaacatcactgagactcagtacagtatttcctggttagtaaatgatgtagactgatttaatgattaattgctttaatgtttactgaacatctacatgtccccacttcctcaaattctccatatctcatatattgatttggctaatgggggtgagagagcaagtaactattttctgacagataattctgttgtcctttgagaggcttgggaaatgattaggatcagtatggaagggcttttcacgttacaaactatttttagagttttcatttaattcacataaaaacaataagtatcacactgtacatataatagtcccttttcactgagcaagatggaattagcactttaaaatgacattggcatataatgagacctcatctctattttaaaagaaaaaaatatatattaaataaaaaggaaaaaaaaaggccaggcacagtggctcacacctgttaccccagcactctaggaggctcaggcagggggactgcttgagcccatgagttcgagactgcctgggcaatacagtgagacttcatctctattttaaaagaaaaaacatatatttttaaaaaatgacattggcatataactttaaactacttcatttctttcacttaatagtgaaaaatctccagtacattggatgtattctattgcctgcataacctcttctcagggcaagacacattagaccttactataccttactagcaaagctcattgctagttttacaaaaaaaaaaatagttttcaaattttatatttgatatggtagttagcgaggtaatgtgttatttattttgtttataaactcttgcagagcttttacttacaatcaaacatattttggggatacaatttaaatttagcactttttttcttcttagttcctctgtggttttttacaaaatgaaaattagagcagggcacggtggctcatgcctgtaatcccagcactttgggaggccgaggcaggtggatcacctgaggtcaggagtttgagaccagtctggccaacatggtgaaaccctgtctctactaaaaatacaaaaaattaggctggtgtggtggcaggcgcctgtaatcccagctactcgggaggctgaggcagaagaatcacttgaacctgggaggcggaggttgcagtgagccaagatcatgccattgcactcccacctaggcaacaagagctaaactccgtctcaaaaaaaaaaaaagaaagaaagaaaattagcattactgttcttttctaataaatatagtatagtataaccttactttttaaagttagcaaatatagaaacaaggaaaagagagctaaaatcttttgggtgtaacaaaaatgtgatcatgatacacatgctgttttgtaatccctcttgcaaagaatataaatctccattatcatttttaagagctatacagcatttgattataatggcgatatcctaatttgaccaatctgtgattgaaagaaatttgagatttttcaatgctttattgcaaaatatgctatggcaataaatatttgtgtaaatactccagagtccatgctcaaagcctctatgtgctgcttttcagaattaacaaatttcttaaaaattaactcatttttcaaatgaacttgacaagaaagtttttaaaaccttgacttttagaaaggttcatgatactgagaagcagacagactgggagatccaatttgtgaaacaaacttaagctatttacagtttgccttgagatggtccttccctcaaaacacttggcaagttgttccaagaggcatggactgtcttgtagagattctgagtctaaaacaaagatttctcaagaataagctcaaaatgatcagatttgatgagcagtaactggttaatccctaaaataagttagtgtttgatgctcatttattgaacttttcaagtttggagcaaagcaacaagagaaatgagattttttcccttccttaccctctaatgtacttgccactgccctttctttctttcctgaatcttctttaaacatatttctaaaaaaagactcctttagaaggatagagaaatcaagagacatgaaatgagattagtaaattttagatcaagtaaaatagagttgatatttatagtttcatttactaaaatgtcttttgttaagtttagaaaaagtttagaggcaatcttaatgtggattatgcttttcatattcttctctcaaaagtatggtcttaaattattcaaaagtttcatatttttcattttgttttgctttcatagcaactttatgagatcattttataaatgaagaaacattaaatgattgattctaagattactgtcagttaactgtggcattcaatttagatgtgaagtctttaaagtcttgcctagtactctactaagcaattcttcaagtcaagaattagtgccccagcttgggcagtactgtctatcaggatttccagtgtgtgatcacggatgaggggaacatttggagggcgtgaggcacacccttgaggatcactgaggtcaactagcttggggcatcatgcctggcatgttgttcttttttctttttttgggacagtctcactctgttgcccaagggggagcgtagtggtgtgatctcggctcacctccgcatgccagatttaagggattctcgtacctcagcctcccaggtagctgagattacaggcccacgccaccatgcccgactaatttttgtattttagtagagacggggtttcaccatgttgcccaggctggtctcaactcctggcctcaagtgatatgtccgcctcagcctcccaaagtgctgggattacaggcatgagccatgcacgccccgtggcatgtccttggctgattttcatgtcaggtatataaaaggttaacagctgtcatttcacttgtccaaaattagagggcatcttacagttctggaggtaagaaaaacaaaaaaattagagggcaaaagagtctatatcctccaaaaacacatccgtgacctactaatggttgagattagctgggttagttcagttttctttaatttagttctcagtatagaatgacagcaagagattaatgaacagaagagggagaacttgctatgcttctacctcattataaatactgtaatcttttagagtagcttaaaggccaagaaaagaaaacactgacacacacacacacacacacacacacacacacacacacacacacacacacaaagtaaggttaagggcaaaaaggcaagcaagcttcctagaacttcccaaacagctggatctagccatcagattattctatctagcatagtattagttaaagccatcaagtttttttaattgcttcctgcaaaattaggcctaaaataacttggatgcagggaatgttacatcaaatgttctcattttgcctattgggcttgctgggcgccatctgctggccttttggacacagtgtaaaacggattctttttggtcttaattgctgttgtgatttgaaaaaattgtaatttttaaaaacttccactgaatgtaatttaatcatgagaagaacattagatagaatattaaaaaccaattaacccagctcttgtgataatgaaactttatgaagtttactggaattgtactatgccttttcttttacaatgacaatgttggctttaggtatttgtgaattcttcatttctgaattctcatcatcaacattcaaaagttattttttatcctcaatttttaatacagcagtttgaattgtggcattttttctgtgtacacaatagaaaagactgcacgtggtcttcaactgtgctatgaaatgaactgacatggtaaacagaacaatcgttttcctttttcttttccaactatatcacctaaaataacactcattttgctggacttctccagtcttgtaaaaacacacaccccaaaaacaatactgtaattcttaatgaacccatggatcataattgagttctaaagtttccattctgcaaatcctaccaccttccccaccaaaccattcaaggtcagcttgacctatatccaagagctgggctgctaacagcgtaactgagtcaggagtggatctgcagtcagaaggccgaaacaggtatgcgtaagtatcttatgtcttttgctattcctccctgctcattgctgtgaatttaatgtatttgtaaataaaaaatatactgaaagcatcataagtcttatatgggggtttcactaattgtaggcagtctcaaatattaagcaagtgattaacaactaatgagaagtgaaaactagcttaccagcaagctgtggtttatcacaatggttgtagtggtttatagagttgtctgagaatcctgtcccctttcactgtttttacaccctggctgccatttgatgctggtgattggtggaggagaggggagtaggtatcatgcagatagccagattgttccagatcagatacctagatgaatgggcctttagtgctacagcaaacactttatgttcctggtatgttctgaatccctaaagagcccatttctacccttcatcattttcaagattttaattgtatgctccaccttcatttctgcagataacctattggccagaggacattatagctctttaggtatgaacacctctaacttgttgtccccttatgtgcaccttagctctcaactaaatcttctttcagctgggcgcggtggctcacgcctctaattccagcactcggggaggctgaggaaggtggatcacttgaggtcaggattttgagaccagtttggccaagatggtgaaaccccatttctaccaaaaatatgaaaaattagctggatgtggtgggtgcacctgtaatcccagttacctgggaggctgaaacaggagaatcgcttgaatccaggaggcagaggttacattacagtgagtcgagatcgcgccattgcactccagcctaggtgacagagcaagactccgtctcaataaataaataaataaataaaactccttgcctgctgtcagaagaactggtattcctattacctgtgttccagtcccactttctactgtgtctttggggttctaacttcattatcccctctcatctacctccaaccttccactcttaagggcctttctcttttgcataactatgactatttttctccactgaaaagagtcaaaaacaaattccctaaggcaactgccctttaccatcttccttcccagtactacacaatctctttcctttcaaataatgcatcttttcctagtcacttcccattccatcttcaaacccaagcaatctgcttttgtttcattctccatggaaagtgttctgaccataaagatcaccaatccttccccttacataatctccctgtagccttttgatgtgttcttgagactcctaagtactcaggactctatactgttccttcttagtctcctttaatagcctgctggtttccatccacctattcatccttatcaaagatctgtctttggtagtgtttgtttcctgggcggtctcattcaatccccaaacttctatgatcatgcatccactctggctctcacacgttcatctccagcttagacccacataataaactgctactgtacacctttgaactaaccgtccccacaaatagtctcaattcatctcatataaaaataagtcctctttccctcccaaactgctgttccacctggatttcctgtttcgttaacaaaaagcatcatctactaagccattcaattcagaaatctggatatactggactctgcccttttcctcatgctcctcatcaactcactcagcacatcctgccatttgacataagtgtttctttacataatccctcctccctagggtcacagtccagaccctcgcgccctcacatgacctccttgcttcaattccagtagttctcaaactgtggtcctctcaacagtgccattagcaacacttgggaatttactagaaatgcaaattatcaagctgcccctcctgacctactgagtcagaaactctagggtggggtccagtaatctgtgttttaattaattctttaggtaattctgaagctaaagtttgagacccactgttctagtctacatccactaatccattctctacacttttaatatagccatcttgcaaaacaaaaaacaaaaaaacaaaaacaaaaacaaatctggttgtattcctgctttgcttaaaagcctttagtgacatttttgactagagtgaaatctaaatttcttagtacagcagaaagaaaaatccactaggatctagatcctgcctaccagttttcagaaagtcaagcactttaaatcatttttgtaagaatgcattgtcatgtagtgattaagggatgagctgtggactcataccacctggctttgaatcttcacttaccactttacaactggctgtgtggccttggattagtcacttaatctcattgtgcttcagttccattgtgtgtacaatgtgaataataacatccatatcataagcttgctgtgcagttatcacaatacttggcactttgtctgggctcagtaattgttagctattattattttgattatgtcaaaaagaaaaaaaacattactggaattaacctgtagtatagcaagaactggagaggattagaattaatgcccaaactaagggaagtggtccccataaaggaaggcccacttctctgggcagtttcagttagttagctaagaataaaaatacccagtctcaacagagaggttcagaggtctttggggtttgactagggtagtgaatctggtaattagattctaggatattataggacagataactgtcaagcttctaaagtgagagccaggaaagctgtgaaggaagtcagaaaactgatacagagcaaagaagcaaagacggtgaaaaatttcatgtatgtttctctaataacagttaatagagcagccaagtgatcaaatgtgagaatcctacaatgactgaaacttggtcgacattttcagacacgctgttggtctgaaacaacgttttacataagagcaaaagcattgagtaatggcgagaatcaaagtctaacctccaccacaaattagttatggtcttggacaaattacttctctcctgcctcaatgtcatgatctgaaatagggggccacattatgaagagaactatatacattcatagcttagtacagtgcctagcatgtgggaagtgctcaatacacggcagccattacttttattgggagtatattatcttatacgaatcatatataaaaataggcacccctggaggttcctgcttgatcaaagcaattatatattatcatcgaatattttgactaaaattgggttccaacttataaggtgaggaaatactgtaaagacaaatccaaacacagtcatgtatcccacattcacaatatttagggattagcaattttcacttcaaatatgtacaagattaattctatccaaatgctcacttagtgtctattaggtgctagcaagactactagcctcaggggggaactaccaagaagagtaaggcatgattcttgtcctcaaggagaatacaggtttgagaagataatgggacaatcttaataaaacataactcaatgctgtatagggtcaaaaaaccaaaccaaaccaaaccaaaccaaaccaaaccaaaccaaacccgcacaaaaaactgcataaagtctttaccaagttgactcatttttcaaaatcatagttctcattttttcctctatcctcctctgaattagtctcaatccatttttacttactccatctttagttacggcagggagtcaagatctagaaaaactagtcactgccacccacgataacagaaggtagcagccacttgtcttctctgctatattcctagtgcgtagcagaaaagtagagaatcttgtcccctttggtccacagaggatggcttattcttctgcttcagctcttagttcagatgtcacctactcagagagcctttctctcagcactcaacctaaagtgttttccctctccctccccattattctctagcacgtgattccttcaaagccctacctttgtgatgaatgctgtgatgtgccaccctgacccccctaaggaatgaaaggcttatttccccagctcctggaagagctgagacagacctcggctgccagcctccgtccatgattgacttggctgaagagagttgaagttaggccctttccagggaaacagacatctaacgacagatcaatcaaggggtataaaagcctggcccttctcttcaactttgaagggccaacccagcactagagttcctgtgggactggtggagaacatccttgagacttcactgcagcttaactttttctattgcccaatcctgcttcctttcttccttggtaatcatccaaaaagtcttctctagtaaatgtcctgcctctaaatctcctcagagtctgattctcaggaaacccaacctaggacaatctagaaacatcttgctcaatatcaatgtgcaatcacccctcagtatttgggggattgcatccaggacccatgatggatacccaaatccagatgctcaggtccctgatttaaaaattgtgtagtaggccagacgccgtgggtcatgcctgtaatcccagcactttgggatgccgaggcgggtggatcacctgaggtcaggagttcaagaccagcctggccaacatggcgaaacaccatctctactaaaaaatacaaaaattagccaggtgcagtggcgggtgcctgtaatcccaaacttctccggaggctaaggcagggagaattgcttgaacccgggaggcggaggttgcacagtgagcagagatccagcttcagcctgcgcgacagagcgagactctttgtcaaaaaaaaaaaaaaaaaaaaaaaaaatcgtgtagttttgtacacaacttgccacctccttccatgtaccttaaataatctctaggctacttataatacctaatacaacgttaaatgctatgtaagtagttgttacactgcagtgtttagggaatgacaagaaaaaaggtctgcacgtgttcagtacagatgtaaccatcttttttcccccagaatgtttttatttatttattttcttaaatagagtctctgtcgcccaacctggagtgcagtggcgtgatctccgctcaccgcaacctccgcctccagggctcaagcgattctcctgcctcaacctcccaagtagctgggattacaggcgtgcgccactgcgcccggctcatttttttgtacttttagcagagaccgggtttcgccacgttggcctggctggccccaaactcctgactcaagtgatccgcccgcctcgggctcctaaagtgcggggttacaggggtgagccaccaaaccccgccgccccaaaatattttctatccgcagttggttgaattcacacatgcggaactcatggatagggagcgtattgtttctcccccatcactagaacatggagtcaggaccgtgcaagtccctcttggtcactgccgtatctactaactcggcagtgctgtagacacgtgtatatctgtttatggataaactgaagatgttaatgaatgaatgaaaccgtcatattgagtctctgaaacggcaacaggatttgggtatggtcttatcggggaggaagacgagcatgaccttagagggtcatccctacaaggtccacagccctgcaagccccgcggctgctttcacgtagctggcagggccacgctgcacaacgtctctaacgccgtcggagggcggcccccacctcccgacagcctggggtacaccgtgcaccctccagacagtcaggggcacacggggcccctcccagcgagggaggggacggggagtcacaggttcggcgtagaaggcggcagcgcaggtgggagcgtggtgaggcgccactcctccagctctccccaccggcgggaagacctcctcgccgcccgcatccgtgccgaccgcaacatttaccatcggcagctatttcagaggtcggtctttcgcctcctacagagagccagcctcctccttgtccccgccctcaaatatccttcagtgaggacaccggtgacctttgggggtggagagggaggcgcctacaagccccttcccctctcttcggccggacacaaagcgggcttttccacctagagtcccagcgctctcacctgcgcaccagccgtcgcgccgccccaggccgccaccgccagaggccccagaaacagatctcaagcagccgctgctgccgcggatcccgacaaccttcgcgtcgcgcgagggcacggagcacgcgcagctctgcggtcgacgccgggccgcccccactccgcttctccgggttttccgtgaagctccagccaacagcggccgtcaccggaaaaaacggggagcgaagtttattcagcgtatattccagcaaattgttgaaactgaaattttaaaagaacgcataaaatttaaataacatatcaaaatggcacagcttctgccttttggtgagcgcttgacaatgatttattgaatgaaagaaagaaatagtccactgcgctctgctctctgtcctgacatgaccaattacaaagcgcttggatttgtcgctcagcgccagtatcccgcctctctgtgcggttgtctggaaaatcaggatttttactctcccgtaactcccgggatcgggtttggaaaacggacatgcgccgtgagagctagttgccttctactaaagcatccgccctcagtccttcctgagggcttacagggaagtgcggagtttcgcagctcgtactcttcacagattagataattcacccggcatttccccatcctgcttctgggttccaggacaaaacttttattctcttttaacattaaaaaacatataggaagttatgttcaaacatggctatttttattaaaatttatccggcactgtgaaagctacctttcctttctcacaatctttcgcaccgaatatatgttccattcttgagctagtcattttccaatgttaagaaaacacaccacagaaaagcgtttttttttctctcggtcagttcaactgcctagcaccgtgagttaccatgatacgttatttgctaatgagagtcattggggtcccagcctttaaaaatagcctgcgtccggcgccatttttgttttgggcccactttgaaagccgcgatattctgaacagaggccatttttcttttgggcagattccacgggccatcgaagtgtttcgctgccatcttaaatcctggctgtggcctcaatcctgcagcgaagctgcccagatcattttgtgtttgggcggcggctgagttcccaaacgcgcgcggagaccctgggaaggaggaagtaagcgcgaaagtgcttcccttaagcttctgaaggttggctgcagttccggctacctgtgtagtccgagtttccacagccaggtactactccgccagtgaccctggacagtaacaaaacatataaagcccgagcccaaaccccgccaccatcataggtaagcacatggacctctgacaacctcagatgttccttcaagtgaactgaactgtttgcccatctcctccctcctggtttttggctttgattttttgagacttttccgaatccttctccctgtacttccacctttcttcattgttttcaaaaagccaaaaagttgctaaacatcaggatgccatgagcatgggcattacggtggagatattattcaggaaagttaactgtctttgcacaaagggaatgcagtagatgggccaggtatttgtatcaaatcatggctacctgcatccagcagtacaaatacctcccccttcccagacatttttggagatgtgaggtaaatacagattgcgtttgtatatacttcccattcattcatttattcattgcatttcttgagtacctaatttgtgctaggccataaggattcaggagttagctaaaaaaaatccattaactcatggagcctacattttatcaccttgacatctactaggttgagacaaataacagtattttatggttcttagcactgctagactgtataaacaagtatttgctttctccttcccctgaactatttttttttatttttagtttttaatttttttggccgggtgtaggaattaatggtattgacacttacttcttggatcctagacataacgatatttgtaagccagttggctagcgttaaaactaatattccagttacttagggccttgttgctccaagttcatttcacctaccaccagcatcagcatccctgggagcttgttagaattacacttcatgactctcaccccagagctgctgaatcagaatcttcctcaagaagtgtaccttaaagttcaaggaacattgattcagggcatgggctaaagatacagccctttctttctttctttttttttttagatggagtctcgctctgttgcccaggttggagtgcagtggcgcgatcttggctcactgccatctccgccccccgggttcaagcaattctcctgcctcagcgttcccagtagctgggattacaggcgcgcgccaccacccccggctaatttttgtatttttagtagagacagggttcgccatgttggccgggttgttctcgaactcctgacctcaggtgatccacccgccttggcctccaaagtcctgggatcacaggcctgagacatcacgcccggcctggcccattctttgttcaacccgtgcttcttaactagattcacagtgtattatcaatttattgcatgttctaaatgcaatggatatttgacaggtttttttctgtgcttttagttcattgacttgatgttagggcgtcaatttagctttccaaaaagttgaaaagagattttgtcatcccaatatacttatatgtaatttctgttataacatctgaaatgtagggttttctctgtaagtcttagcatccaatttaccactggtttgcgttttttttttaaaagttgtttactgtgcttcttgctttctcatatcttgtatgcatatttgtacttttaatttgttaaaagttgaactcaaaagtttgcatgtggacagcagttcaatactgacttggaaaaccttgggccttggtttaccaaagctttttgtggcaccttgctttcttctgtcttcccattttattttacttcttttatttttattttttgagacagggtataaccctgttgcccaggctgaagtgcagtggtgggatcatagctcactgtaacctccaactcttgggctcaagcgatccttctgccttggtctgtcaaagtgcaggaaagcaggcatgagcgactgcacccagctgccttctgtctttctttaatgagaagactaaatcaagagttctcagccttggctgcacgtaacaatcacctgggagctttaaaaacagactccagccctgtatctgcagagattgagaccctctggatgaaattaaagagccagtaaggagtatgagaaaacagaaacaacttttacgttttatgttgctatgttagattttctctcccttatggtgttacttaaaataatcgggattttgaaaaccatgaaaagatctggattaagaatgtaaggaaccagcttcccagtaactggtcaacttgccaattatttgctctgtgtcctaagaaagttgtccagcctttctgcttctcctccctccatctattaattgggaaaagaaaataaagccactgttgttttttatttagtttcatgtggtgttgccaattgtagtgaatgtttatattctgtgagtgtgagaaagaaaagtattttacaagtacaatattcattgcttctagtattaacatacctcatattgtgtgtggcagtagaacatgatgggttaggaaattaactctagagctagactccctgggttcaaattctagctcctctactaatcagctttgtgaccttgatcagataacttatcccttcactacctcagtttcctcatctgtaagatagggttgatgtgaacgttagataaattcatacaagaaaaatgcttgtcatagtgcccggcacatagtcacagccatgtaaatattaattaactattgttaaattttatgataattaaatttctgggctttaaggttttgtttatgcatgcaaatcaccaggggaaaggtattacagttctgtgacttttcgggatatgaacttgtttagaaaagagggtgatataaacacaatataccaggcctggaagaggcctttttttttttttctgtaagtacttttaaacagctttattgaggtataactgttatacagttaatgcacatattaaagtgtacaatttggtatgtttatgccagtgaaaccatcacctcatcaagataatgaaggtatccatcacccctaaaagtttcctcttgccgcattgtcatccctccagccactcctcttccaggaaacctctgatctatcgctgtagataagtttgcattgcatttcctaggtgtgtgtgtttttttttttttttttttttttgagatgaagtctccctctgtcacctggactagagagcaatggtgcgatcttggctcactgcaacctccgcctcctgagttcaagcaattctcctgcctcagccttccaagtagctgggattacaggcttccttcaccatgcccagctaatttttctttgtatttttagtagagatggagtttcaccatgttgatcaggctacctgatcaaatgatctgcctaccttggcatcccaaagtgctgggattacaggagtgagccaccatgcccggccacatttcctaggtttttatctaactgcagtcttggagtatgtgctttttggggggtacgggttagtctggcttctttcatcatcatcataatcattttttttttttaatttttattttgttttagagaggatcttgctgtgttatacaggctgctcttgaattcctggtctcaagcaatcctgcctcagcctcccaaagcactggtattataggcatgagccacacacgcctggccatcataattattttgagaaccgtctttgttgttgggagttttgatagtttattcctttttaattactcagcggtattccattgtgtagatatataataatttgtttacatattcaccaattgatggacatttggtttgttcttatttttacaatctcattctcacattgctttgttcttctctagcttattttaattaaaaacgtttttttcttttttcatttttttgagactgggtcccactctcaggctggagtgcagtggtatgatctcagctcgctgcagcctccacctcctgggttcaggtgattctcgtgcctcagcctcccgagtagctgggactacaggtgcgcaccactgtgcctggctaattttttgtatctttagtagagttgggtttttaccatgttacccagacctgtctcaaactcctggactcaggcagtcctcccaccttggcctctcaaagtgctgggattacaagtgtgagccacgggggctggcctaacaatttttttagaagtttaattatttggtaatgaagccttctgtatacagtgaaaccaagaggtgatagtcataaagcatgtttgtattaaaacttcacctttgctgttatgtagtttatgaattaatgttttgtgaatgaaacatggctttttaaaaatgcaaaatgtgtgcattgacttttaagtggattgttagttcttgacatgtacatgtctaatcactttaagctgtattaaacctcaagtctactttttagagattgaggacaataattcatgcacatgaagaaacctatttattaggtagcaaagtagagatctataaagccaaccctataatttcataaaactcccctttgtcagggagatggggagtaccacttatattttgagttgatgtaagtatatttctaaagtctttttgcttctattatgtaaaagcggttacttgtgtttattttagtattgacgttttgtgcttgaataaatcagaggtggtttaaaattggatttgactcatattaattatgggataatatatagaatatggctattacaatatcgtggacatagaaattcatttgtgtcacttttgatttatcttctagttagaaaagattgcattttttttttattttttgcatttaaaaattattccagacccagtacggtggctcacgcctgttattccaacactttgggaggccgaggctggcggatcacttgagatcaggagtttgagaccagccttgccaacatggtgaaaccctgtctctactaaaaatacaaaaattagctgggcatggtggtgcacacctgtaatcctagctacttgggaggctgaggtgggagagttgcttgaacccacgaggcagaggttgcagtgagccaagatagtgcaactgcgctttagcctgggtgacacagtgagactctgtctcaaaaaaaacctagaaactaaaaaataaataaataaatattatttttaatttatgtaaaataaaattattcttgggtatgtagttttcagagttttaatcagtgcattgagtgttttgtaaccactatcgaaatcagcacatggaacagttccatcagctccttcctccccaacttcccttctgccacccctttgtagtactccttaccccttcacctttggcaaccagtgatctgttctccatcataacagtttttgctttgaaatgattagattttaaaactattttattaatgattatcagaactttttttttctatgtaaaggtgactggaaaacattagttatcagagttcttgggttacaaagtggattgatcatgtgctgtttgcttgtgctcttgttgttggaatgattccgtttaagacactgagcatccactgtgtatcaggcactaggccccataattacatatctgatctcatgtaatccttacaggagccatgaaatagaaactgttgttattatcccatttcagaggtaagaaaaccagagacttaaaggagttgaatagcctgtctcaggtcatacgaagagtcagaatttgaagggatgtgttttacaagaacctaaggacatgcatcaggtgtgggtgcctatgtctgtttctgactaggtattaaataaaaactagattcaggccggacatggtggggtcacacctgtaatcccagcactttgagagtctgaggcgagtggagtgcttgagctcaggacttagaaaacagcctgggcaatatggcgaaacctcatctctacaaaaaatacaaaaattagctgggcatggtggcttacacctgtagtcccagctactcggaaggctgaggcaggaggatcacttgaacctggggaggttgaggtttcagtgagccgtgatcacgccactgcactgcagcccgggcaacagaccgagaccctgtctctaaacaacaacaacaacgaaaacctactaaattttgcctattagtaaagcatcccatgcagtggctggtggggattttctgtgggcacagcaggaaggggaggctcagatcatgggtcaactgactaggttgagagtatagagtaactaaaaggtagcactgttccatggaattattcttggtagagtatcaatgtttgacttacatttagtgacaaaggatttttaaaagttctaatttttttgttacttgcattatcctctttccagtgttgaatctgacgtgtttgtttttgtttttttttttataagtaaactttggcattcagaattaccatctgaataatagcaaaaactaattcttttttacactgaagttgcctttcagcctttatctgagtggtcaccagtgaggcctttgctcatttgtcatttttccttggtcttttgttaagtttgtgattcattccttgatattggttgttttggtggtaagattggtgcatgtgttgggagaggacaacagtgaaatgatttctcattcttgaattatagctgtaacttcagaagttctagggctttgcctttgctgttttctgtttctgttcccataactaatgaaagttttttaagatgatagaaagaagcataataatttcctagataaaatttgaaatctggagattagaaacctaaagttaatttctggtctatttaatgagagcatttgcttgtgacacaggccagcaacactagaaagaagacaaatgtgaatttcagagtgccttagattttcccacagaataatctagagggtcattgactttctttattagagtttatctctgctttgtatttaaatgacaggacaaccatgtgatattgtttaatctacttccattcccttcccaaattaattttttaaagctcttaggatctttctcactccactaaaaacacacatgtaatcatatttttggtaggtcataccctatcaaagtctcctctttgttaaagaatgcttgttttcaggcctgagagagtggactcaagaatgcacaatagaagatgaggcatcatttgtaagttataatatactctaacttagcatacttatgtaaattatatactttcagatatttggaaaattgatctttttgggttgtcctacacttcttaaaaacaggcaacaaaataaaaatgccactgaatttagacttgaattgccagctctggtagcaaaggctttttaacatttattctgtaaacctggtcactgagcttgttgcatcctgctgaaagcaactttgagggcctaggaaaataatcattgaagatgcattgttgctttttgtgtgcgtgtgtgcacacttgctttttaatgatcagtaaaaaaaatttagaaaagcctcaggatgttccttgatttaaaacttaattaagatagaagctaataatatcttttccatttaaatgaatgttaaaatgccagtattttaaagacaaagaaatttatgcaccaaaaacatcatctttgtggtataaacttcaaccacacctctaatctgttgcccattattttcaatatgaaacactaggatcttctgggtatgtgtttatatgaattacaactctcagctttggctgtatgattatatataactgaagtattatttatttggtgaaataggtccagagtgcttgacctcttttttggaaggcttactgtggaatttggaatttagggacagtaaagatacgttggataaataggtataaatctaaaaaaaaacaaaaacaaaaacaaaaaaccacattctgatttagtaacatcaatggacccaagtcagcaaacttttaatgcataacagtgccacaccccaaatattaaagaggagatgaatggaccctgtccctgggaatcttatagtcagggagaggaccagagttagttataattcagtgggctaagcgtgagagtagaggtggttcaggtgtgtcccagagaaggagcaattcacttggttcatagaaggctccaagaaacaggtggcatctgagttgggtctcagaggataactcaactcgctttaggagaggacattccacagtgcggcatgcatgggtgaaggcagggagagctggagctgcatgttcaaggacatgtgccaggagttggttatgtggtggcattacaggtgtgaagttgcctgtgccataagatggaggtttgggcaggggcactgatattgttcggatttgtgttcctgagcaaatctcatgttgaattgtaacccccagtgttggaggaggggcctggttgaaggtgattgttcatgggggcagatttcccacttgctgttctcaggatagtgagttctctcaagctctggttgtttaaaagtgtatagtacctctctcttctctctcttcctcctgctccagtcatgtaggatgtgcctgcctccttttgccttccaccatgattgtaagtctcctgaggcctccccagccatgcttcctgtagagcctggagaactgcgagccagttaaaccacttttctttataaattacccagtctcaggtagttctttatagcattgcaagaacagactaatacaagcattgacaaaagggcttctgatgctgtgggaaatcccagtgaagagttttgaataggggacttatgctcagatacctctaatgttgggtttggggatggggaagtacaaggatagagattagaggtactttaagaggctgtagttgtaggggtctggagctgctggcatcaccatgtgttttagtctgcctgtgctgccataacaaaataccttagactgagtaatttataaacaataggaatttattgctcacagttctggagaatgggacgtttaagatcaaggcaccagcagattcactgtctggtgaggggtttctttctttctttttttttgagctggagtctcgctctgtcacccaggctggattgcagtggcacaatctcagctcactgcaacctctgcctcccgggttcaagtgattctcctgcctcagcctcctgagtagctgggattacaggtgtgtgccaccatgctcagctaatttttgtatttttagtagaggtggggtttcaccatgttgttcacgctggtctcgaactcctgacctcgtgatccgcccgcctcagcctcccaaagtgctgggattacagacatgagccaccgcgcctggcctggacttgctttctgcttcgaagatgataccttcttgctgtaccctcacataaggtagagaggctggggagcttgtttgagccttttttaaaataagggcactggtcccattcatgaggatggagccctcattatttatcactttccaaagtccccaccgttaatactattacactgggcattaggttccaacatataaatttggggggataccaacatgtagaccatagcaccatgttgtgatttttccttctcgtgggaggcggatgggcccatccatgactgtcatctgttccatcccagataacaggctgtgtgcatgtagtaagggaagagaacatgtgttccccacagattctccgtcaattcttctgtgtttagatatcacaactaattgggttttgtaaaagaatagtgagggacatgcccctcagctcccagaggatatacaagtctcatggttggatgttgcacagtggttgtcaaggcctaaataacagaagggatgagaagctctccttccaccccctactgccttgccagacctgcagagactttgttgggaggcaggggcaccttactctggggaccacctctccccatttttctgttggattgctttttcttttttctttctttttttttttttttttttttgagatggagttttgctcttgttgcccaggctggagtgcaatggcgcgatcttggctcactgcaaactccacctcctaggttcaagcaattctcctgcctcagcctccctagtagctgggattacaggtgtgcaccaagacgcctggctaatttttttaatttttagtagagatggagtttcaccatgttggccatgctggtcttgaactcctgacctcatgatccgcccgcctcagcctcccaaagtgctgggattacagatgtgagccaccatgcccagccgatgagattgccctttttttttttttttgagatggagtctcactctgtcactcaggctggagtgcagtggcgtgatctcggctcactgcaacctccgcctcctgagttcaagcgattctcccgcctcggcctcctgagtagctgggactacaggcacatgccactaagcccggctaattttttgtatttttagtagaaacagggtttcaccatgttagccaggctggtcttgaactcctgacctcaggtgatctgccctacttggcctctgaaactgctgggattacagccatgagccactgtgcctggctgagattgcttttttttttttttttttttttttaactcagcctatttccttaaaatccatccaagttgcatgtatcaatagtttattccctctgcctgagtaatatgccagggtataaaggtactgcagtttgtttaaccattcacacgttgaaggatgtctgggttgtttccagtttgtggctgttaagaataaagttactatgatggccggatgcggtggctcatacctgtaatcccagcactttgggaggctgaggtgggtggatcacaaggtcaggagttcaagcccagcctggccatgatggtgaaaccccgtctctattaaaaacataaaaattagccaggtgtggtggcaggcacctgtaatcccagctacttgggaggctgaggcaagagaatcacttgaactcggagggcagaggttgcagtgagccgaaattgggccactgcactacagcctgggcaacagagtgcgactctgtctcaaaaaaaaaaaaaaaaaaaaagttactatgaacatttttgaacaagtttttacgtgagcctaagttctcatttctctgggataaattctgaggagagcaatttttgggttgtttagattgataagaaacttccagtcacttttcctgagtggctgtaccacttttacagtcccaccagtgatatatgagagatctattttctctgcaccctcaccagcatttggtgttattgttttttatttgtctttctggtagatatgtagtgatatctcattgtggttttattttacattttcccatggctaatgatgttgaatatcttttcatatgcttttttaccatctgtatatccttcttggtgagatatctgtttgtcatttgcccattttctgattggactgttgctttttactattgaattttgagactatgtattctagatagaaatcctttgttagatatggattgcaaatatttttctcccagttttcttagaaaagttttaatttcaatatggccaaagctgtcattctttttctttatggtttacattttctctgtctagttaaaaaactcctttatgattttgagttcataaaaatatcctctgaaaggttttagtttcacacctttgagtttttaacccatctgtaattgatttttgagtcttgtatgagatcgagtccaatttaattttttctcaaatagatatgagcagttgtttgaccacagtttattgaatgagtcatctcttcatttcacactaatttcacagtgctgctcccagcatgcatcagtttcataaatgcatgcattggtttctggtgtgtggagtctgccccctctgcctgtttgtctgcccgtttgccagtacgttagtttttttaccttgcattgtagcagttttgcaagccccatcttttgtttttttcttccttttctagaagtgtcttgatcttttttagtctttctcagtttccctgttcaagtttgtgtttggagttgcattaaattagtagatcagtcagaggatgtctcgtatatatttttttcattttattcctagatactttttatttgtgggatgctagtttaaatgatattttaagttctacattttctacttgttgcaaagaagttgtttctactggttcatcattaagcattttgttacatttttgtagatgctttttttagattaagaaattcctttgtattcatagatttctaatgttacctttttatttttttctgcttctactgaaatgtttatgtgccttttttcttctttagtttttgtttttgtgttttgagacagggtctctgtcacccaggctggagtgcagtggcataaacatggctcactgcagccttgaactcctgggctcaagtgatcctcctgcctcagtttcccatgtagctgggaccacaggtgggggctccacacctggctgatttttttttttttttttttttagagatagggtctcactttgttgcctaggctggtctcgaactcctgggctcaagcagtcctcctgcctcagcctcccaaagtcctgagattacaggtgtgagccactgaacccggcctctacttcagttttttaatgtgatgatttctgtagtgtttagctaaccttgcactcctcagatacctcacttgattctgatgtttgtttgtttttaagtaggtttgctagattaaaattgcttttagattattgcttctatgttcactcatagaattgactgatttttcattcttttactgcctttgtctggttttgctatcagtactccataaaatgagcggtgggatgatttccttcttactcttttctctggaagaatttgtatactggcattatttgaaccctgaactactgttgatttttggattctagaggtttagaaatggaatagactatagtggtcaacctttccaactccactgtttttttgaggtgggaagaattaaatgctgaggcttaaatccaagggacactttgcactgtaccatgacccggtgatttcatcattatagaaaccctaatcctgaagtagaggtaatagtcattttattatgtaaaacagatggctcaaagccttcgcacactgaagtccatgcaaatccatgtaagagtggcttggaaaacatcacattagccttagtctcttagttttctaggcccatctgattaagattaagaatggagttaagaaagggactcaggcactctgacagctctgggatcacctgcgagagcaggcagacgaccccgctggcctactgttgagcagctttgagtaggagctagcagctcacaggggcagtgatgtgtttattgctcagtgtgatgataactttaattgggaatatcagataaatattcaatatatggtatttttatgaacattaataaagattcagtatatttttggaaaatttccctaaaaacagaaaaaaaataaaaaggttatatgcataagtgactcagcaccaattatctggaacatttttttcacccagcaggcttttcttgagtaccctctagtgttaggcattgctctgagggctgctcacatatgagtgtgtactccttccaccatggataagtatgattttaccatatttggaacttagcagattggctcagttcatttcagatttcaattcaccgtttaattcatccccagcacatgcctagtgctgtcataaaccaaagaaaagatggtttctttatctgaaatgactttagcaaatatgcaagctcaaggtctatgcaaccgactttccagatgtgttatgggctttatcttggtagaattcatttatttatattttgtctatgaagggtgccatattatgtagcatagtgataaattaattcaaacttcattttcattaactatagagtttctttctttctttgattaacaggagaggaccactacacatgtagcttcatttgaggtcatactctgtgttgggaacttggaccttggcgtgaggcagagggaagaaggtcacacctaccctgacagcccaattagtcactgactttggcaattctacaggtgacagatggtgctagtttgccctcagtggacctgacaagactctatctagcgcttggttaggccatcagctgtgagatgctggcctggtcccataagttctcattaggggaatagatggcaaggctgggagtagagggtctgtaagatctattttagccctaaaattgtgactttttgaatttccaaacattgtggaaacaagtgaaaaagttacataacttgaggcagagtgtgttatgatattaaaaacagactaaaatattcagaatatagatttcattcttcccaggtagcctattttacattgtcagaccatattattttatataaaaaatacatgcttttcagttccagatccctagagatcatttttttgatattggactttgatgatactctttgaaaaattcagaatctacatcgtaaatgtagctgttcttgttttattgataaaagtaaaaaaaaaaacccacaaaaacaaaaccttattgtgagttgaaaatgtgaaaatgtaactgtattagtaatattagccatcacagtaacctcactgtaatatggctcatttatgatctatccaaggcagatatgatgtgaaagccttgccttggccttccacgtggtctatctgtccttcaggaaaaaaagtacatatgggaaaactggtgtgtaattaaaaaataattggatcacacattttttttacctgtgatggttacttattgacaaaactgtcccctttttcctggttccatgtctagctgatgcacttgagtattctttttaagtaccctcatttagggacttccttaattcttagcaagattattcaagcctgatttaatgtatttaaggtgactgattttatgtttattagacaaaaataatgtaattttaaaaaattcatataaagttttcaggacaacctttatatacattgtttttaaacatgtgcctgatttcccaggaacttactttttttccacttacacttgcgtctaaatgggcttgctaagataaacttcattaaatatttttctaagtcatgtgcattatgttatttagagaatggaaatgaatacttaacatgacttagggtttggataaagatatttttgtccatttaaaaaattaggatctcatcacataggaggcaaacattaaaacattaaaaattaaaaccaaagggtaccaatttctaaaaaatcactgttgactgagtaataataattatcaatactcatcgaaggcctagtggtttttttgtttgttttgagacggagtctcgctctgtcgcccaggctggaggacaatggtgcgatctcggctcactgcaagctccgcctcccgggttcacgccattctcctgcctcagcctcctgagtagctgggactacaggcgcccgccactacgcccgggtaatttttttgggtttttagtagagacggggtttcaccgtgttagccaggatggtctcgatctcctgacctcttgatccgcctgcctcggcctcccaaagtgctgggattacaggcgtgagccaccgtgcccggcaggcctagtgtttttgtatgtcattttatttagtcctttcaataattttgagttaggtattattactcttattttagaaataaaatattcaggatacagaaataagtgcccttcttatttatttttttgagacagagtatcactctgtcacccaggctggagtgcagtagcgtaatctcggctcactgcaatttgcgcctgccaggttcaggcgattctcctgcctcagccttgcgagtagctgggattacaggcgcccaccaccatgcctgcctaacttttgtatttttagtagagatggggtttcaccatgttggccaggctggtctcgaactttgaccccaagtgatccacgtgcgttggcctcccaaagtgttgggattacaggtgtgaaccaccgcgcctggccgtgtttttcttgtttaaaaaaaggctctcaaactgcgctgtccataatggtggctacctacaagtgtctattgagcacctgacacatgaccagtccaaattgagatgtcctagaaatataaccaatttcaaagtcttggttaaaacaacaagcatgtaaacatttttatatagctcacatgttgaaatgctaacatgttggctatatcaggttaaataaaatagattggccaggcacggtgactcatgactgtaatcccagcactttgggaggccgaggcgggtgaatcatgaggtcaggagttcgagaacagcttggccaatatggtgaaaccccgtctctactaaaaatacaaaaaattagttgggcatagtgacgggcgcctgtaatcccagctacttgggaggctgaggcaggggaatcgcttgaatccaggaggtggaagttgcagtgagccaagatcgtgccactacactccagccctggtgacagagtgagacaccgtctcaaaaacataaaataaaataaaatagattattcaaattaactttatctgtttctgtttacttttttaaaaatgcaactactagaaaacttaaaattacatttgtggcttgcattatatttcttttggaagacctgttctaaaaatttcaacgggcaaatagttccatgctcaaggcttgtgaattatggtgtcctcctcaacccctttcctccatccttgtgagctctcttcatcttgttcttcagtttggggcagagtttagtacttaagaattggatccaggcagggcgtggtggctcccacgtataatcccagcactttgggaggctgaggctggtggattgcttgagctcaggagatgaagaccagcgtgggcaagatggtgaagctccatctctataaaaaatataaaaataggctgggcgcagtggctcatgcctgtaatcccagcactttgggaggccgaggtgggcggatcacctgaggtcaggaattcaagaccagcctgaccgatatgatgaaactctgtctctactaaaaatacataaattagctgggcgtggtggcatgcacctgtaatcccggctactcgggaagctgagacaggagaatcgcttgaacccaggagacagaggttgcagtgagctgagatcacgctattgcactccagcctgggcaacaagagcgaaactgtctcaaaaaaaaaaaaaaaaatatatatatatatatgtaaattagctgggcttggtggcatgaacctataatctgagctacttaggaggctgaggcaggaggatcgcttcagtccaggaagtggaggttgctgtgagcctagattgagccactgcactttagtctggttgacaaagtgagactctgtctcagaaaataaataaataaataaataacgtaaaaaattttattaaaaaaaaagaattggatcccgatcactaaattaccgtctgtatttttgctttactatagctattgtggttgttattgtttttactggtctgctttgtttctgaaacattccatcaccattagagatcttttgctctgtttaacctctatgccctcaccatatttatacacacacattccctatttttctaatatcatcgtaagcataatattgtttaggtcaggattcaatgtttgctattataactataaatgctagtcataactgaactgtgtattaagcactctttttatttactgcagtttttgtttatcatggaatcagtcattgccttgttattcttctgctgtttagctttccatgtacctgtcctaattcaatctcatattctccacgagttgtctaaaactcatccgtgtgtgtgtgtgtgtgtgtgtgtgtagatcttcctggacgtgcctctcccctgcggcctgctctggtctgcacctgcgcttctcctgtggtctacccacagctctcatggaggcctcctttcaccagatcctcagctttgctctgcctttctcctgtctcacccttcctgtttcctctttcttgcttagtttcctcattttggtgaagcacatctttagtagcttcctgagaaaaaatacatgaaacagttttataagagcttgcataagaattttttttcttccctgaagtttaaatccagtttgaggttggaaacaattttcttcagaattttgaagatatttctccatttctttgggcggtttggaaccaattctgactcctgatcctttgtgttctccacctcctactaccccccaacgcacttaaaaaaaattttttttttatccccaatgcctaaaatttcactgggatagatgctgtaatatgggtcagtctccatactaattttcatgtgtttgacctcctatattggtcttttaattttaatttattgtctcttttcatttttttaatttttgctgaagtttctgagagatttcatcagctttatctttcaaccattctattaagtttttaaaattcaactatcattgttttagtttgttgtcttctgatagttctctttttttgttgctgtcattttttgctttatggctgtagtatctgcaatctccctaatgataattcttaaaaaatgttttcttctccctccatactttgtttcagccaaataggtttttttctgtatttggttttctttcataatttaatcttgccttaggtggtaggtgattcctgcttgtttacttgtatttgagagtgggacattaaaagatgactagaatctctgcatatgggtgtggggcttatggatgtggacttcacttaagagccatctgtttaggctgttccccaaggaacccctatgtcagtatttttagacagtgtcttttaggttagtccaattctctgaatagggaggtttcagtctgcagtctggagagtatgggcagggtagagaggcatgcaggcagaggaaggtctctgtatttgtattccctaatgtctctttgttcagaagactccaccttctactgtgcctggtgttttccagactagagatcctctgtcttaccctcttcagaaaatactccaggtttctgccagggtgagaaaaagcagttgcctggctgagcacagtaaaggggaatatttacctttttattgccaaataatattctattgtatgatatatcacattttatttatctgttcattagttgatggacatttgggttgtttccattttttgactattattagtagtgcttctgtgagcattcctgtataatttttttgtatggagttattattttttttcttggatatatccttaggaatggaaatgctgggtcatgtggcaactctttaaattttgaaatgctatcaaactattgtgcaaagtggctacattttacatgcctaccatcaatgtatgagagttccagtttattcacatccttgccaacatctgttattatttgtcattttgattttagctatttatcttaatgggtataaagtaatatctcattgtggttttgatttgcatttgatggctaatgatgttaagcatcttttcatgtgcttattggtcatttgtatatcttctttgaaggaatgtctattcaaattctttgcttatttttaaattatttgtcctcttattgagttgagttctttatatattctggacatgagtccttcatcagatgtatgatttgcagattttttttctattctgtgtattatctttttactttcttggtttgaagtataaaagtttttaattttgataaaatctaatttactaattgtgtttgtcacttctgttttggtatcatatctaagaaactgttgcctaatgaaaggtcacaaaaatttatgcctttgttttttcctaagatttttatagttttagctcttatatttaggtctatgatccattttgatttaactttttgtatatagtgtgatgtagcagtctaactttattatttggcatatggatactcagttgttctagaaccatttgttgaaaaaactattttcccatcaagttatcttagtacccttgttgaaaatcaattgaacataaatttaaggatctatttctatcaattttattccaattgacctgtatgtcttttatttatttatttatttatttatttatttatttatttatttattttgagacagagtctcactctgtcccccaggctagagtgcagtggcgcaatcttgccacactgcaacctctgcctcctggtttcaaatgattctcgtgcttcagccttcccagtagttgggattacaggtgcacaccaccacacccagctaattttttgtatttttagtagagacagggtttcgccatgttggccagggttgtctcgaactcctggcctcaagtgatttgctagcctcggcctcccaaagtgctgggattacaggtgtgagccaccgtgcctggcctatatgtctgttcttatgctagtataggttgagcatccctaatatgaaaatccaaaatacgaaatcctccaaagtctgaaactttctgaatgccaacataatgccacaagtacaaaattccacacctgacttcacatgacaatctgtagtcaaaatgaagtcaaaactttgtttcatgcacaaaatcataaaaatatgtaaaattcaggctatctgtataaggtatatatgaaacataagtgaattttgtgtttagatttggatctcatccccaggatatctcatcatgtatgtgcaaatattccaaaatctgaaaaaatcctacatctgaagcacttctggtcctaagcatttctgataagggatactcagcctgtaccatactgttttgattgttgtgatgttgtagtaagcttttatttatttatttattttatttgatagtttttcagacggagtcttgctctgtcacccagggtggagtgcagtggcatgattttggctcactgcaacctctgcctctcaggttcaagcgattctcctgcctcagcctcctgagtagctgggattacaggtgcatgccaccatgcccagctaatttttgtatttttaatagagacggggtttcaccatgttggccaggctggtctcgaactcctgacctcgtgatctacccgcctcggcctcccaaagtgctgagattaacaggcgtgagccactgcgtccagctgtaataagcttttaaattgagaaggctgagttctccaatttgattcttctttttcagtattgtttttgttactccagatctcttgcattttcatatacgttttaggataaacttgttaatttctataaagaagtcagctgggattttgatagggattatgttgaatctgagaacaatttgggaatattgctatattaaccgctttaagtcttacaatccatgaacacgggttatctttccacttaagtctttaatttctttcaattatattttatgacttttggtgtacaaatcttgtacttttgctatgcttattcctaagtattctttttcatgttattatgaatagaatttttctttaaattttattttaggactattcattgttgatatgtagcaatacagtagattttaaaatatttatcatatatcctacaaccttgctgaacttattaattctagtagttttttgatgatttgttagggttttctatatatgagaacatattgtttatgaatagacagtttatttctttcttcctgatctggatgctttttatttctttttcttgcctaattgccttagttagaacctttagtacaatgatgaaaagaagtggcaagagcagacgtttcatgtaaagacatgtctctcatcttaagggagaaaacatttagtcttcatcattaagtatgattttagcacttggtttttcctaaatgtcttttatcaggttgagatagttccttctattcctattgtgttggcttttttttgtttttaattaaaaaagcattttgggttttttttttttgtattatgattatgtgcattttttctgttattctattaatagagtgtattatattgattaattttcagatcttaaactatccttgcattcttgggctacatccaacttgatcgtggtgtataatcttttttacatgttgctatgtttgattttctagtattttgttgagaatttttgtgtcttcataagggacattgatgtgtggttttcttgtgatgtctctctctggtattggtatcaggatgatactggcttcagaattatttgagaaatttttcttatgcttctgtttttttaaagagtttatgagggattggtttaaattattctgtacacatttgatagaatgtagcagggaagccatctgagcctgtgcttttctctcttttttttttttctttctgtagagatgaggtcttgctgtgttgcctagtttggtctcgaactcctgagctcaagtgagtctcccactttggcctcccaaagtgctgggattataggtgtgagccaccatgcctggccagggcctgtccttttatttgcaagcagtgcttaaattactaatttaatatagtattttggttaagggcaattataagtgaacattcatctcataaatacctattgatattttactattcagcccatctttttcctgtataatatccaaataaaaagaaattttaatatacctaattgtaacttttttttttcttaaaggtctgtagttactgtggaatcaataagccatggcatctaagaaatttgctgttaaagtaagtaatgtttaatagctttttaaaaagaggctaatcactttctaatataactgagctctgtgttaattgaaaatcgaggttcctaactttctgctttttacacttgggactctgcaaaatttttttttttccttcaacttttaagttctggggcatgtgtgcaggatgcgcaggtttgttacataggtaaacatgtgccacagtggtttgttgcacagatcatcccatgacttaggtattaagcccagtgtccattagctattcttcctgatgttctccctcccccttcccccacaacaggtcccagtgtgtgctgtttccccccatgtgtctatgtgttctcattcagctcccacttataagttagactatgcagtatttggttttctgttcttgcattagtttgttgaggataatgccttccagctccatccacgtccctgcaaaggacatgattttgttcctttttatggctgcttagtattccatggtgtatatgtaccacattttctttatccgttttttcactgatgggcatttaggttgattccatgtctttgctattgtgactagtgctgcaatgaacatacgcatgcatgtttctttataatagaatgatttatatcttgggaggtatatacccggtaatgggattgctgggtcaaatggcatatctgcctctagatctttagggaatcgccacactgtcttccataatagttgaactaatttacactcccaccaacagtgtaaaaatattcctttttctccgcaatctcaccagcatctgttgtttcctgactttttaataatcgccattctcactggcgtgagatggtattgcattgttttggatttgcatttctttaatgatcagtgatgttgagctttttttcatatatttgctggctacacgaatgtccttttttcagaagagtctatttacgtcctttgcctactttttaatggcgtcatttgttttttttcttgtaagtttgtttaagttccttgtagactctggatattagacctttgtcaaatggatagcttgcaaatattttctcccattctgtaggttgtctgttcactgtgatgatagtttcttttgctgtgcagaagctctttagtttagtttgatcccatttgtcaatttttgcttttgttgcaattgcttttggtgttttggggacttgacaattttaagtaggcatatggaaaatttatattttgagaatgagacggcggagaaaatgttcatatggttatgaggcgttccttgcttcatcttttaaagatgctttttggtcatcacttggtctttactgttaaaaactatcattcatattccatgtccatggcttgatttctcattatgtcaaagcagataaaaggttgaagcaaaagaagtaatcagcaaattctctacctgggtaaatgccaggagagttctcttgcctggttgccctctttcattttcctcttataaatgtcccttgtttgttccttgatggctggggttgagaccttctcaggtgtggatagatgggaggctcctgtgtgagggatagtgggaagggagaagagaagaactgatgatgagtgcaagatcttggagatgctttcatatatgttggtgtttctttaggacattttctgtatgctagtcttaccataagtgcaagttcaaaacatcaaaatataaattacaatagctagttggccagattagatactatgtaatattatagctctgtcttatttttaaccaagtcagtgcttatttagatttactaacatatttataaatttcattgctttcagttgttttttgtatccatatatatattctttagtatttctttctgtgaaggcatgtaagtgatgaactttcactatttgtgtgtctaaaaatgtatttggtctcaccctagaaagatatttggttggttttagaattctaggttgagcattattttccaacaacagtttaaagataatttttaattttcttctggcatcttttattactactgagaaatgttttcattatgtattgatgcttaaatccaccttaaaacttagtggcttgaaacacgaaccattttataatctctcctgattctgtaggttgcctagcatcaattgagtaatttttccttttgatgttggttggggctgcagttctacttagggactcaacttaggtggaaaatgaaagatggcatactcagtgcagttgatgctggctttggttggaatcattgctggatctgttaattgttgtcctttagttctcatccacgtgcctgttctgcatggcttgggcatctaccccggtggctgagttttgaggggtagcatcttaagacttgcacaatgaaagaagtataatttgtcagtcctctgaaggcctagatgcagacatctcagatgccacttctgtggacttccattgatcagagcattcacagggtcagcctagagtcaggggaagctgcactcttgacttgagaagcagtattttctcacagggattgggagaattgttggggtgcgtctatggagactactcacctcagaagttcactgttggcctgatctgattccttcttggttatctgtctttcttctctgattgctcttaagatttatttttgtctttgctcttctatagtttcactatgaaatctctagttatagtcttgtttttattctggcttgggataaaatgtatgtcttcaatttgatggctcaagtcatcagttttggaaaattcttgaccattttctctgcctctcctaattctctctgttctcttcttatagagaacttttatttgaagtttgttggatagtctcatatgactttattatatgctagaggagtgagattaatttttccaagactgagccctggtagtctgtctgctcagaaaagggctgggcttcttgcaaaactctgttgaaactggctatggccaagtagggcagaccatcctggtcaaccatgaaacttggacgtgaggcccctaattatgcaagagatgggtctgttccatacccatggaaatggcatattctgctaccatattatcccatcttatagtgatgcctgcaaggcttggaacaaagcttccagatcatggcaggcagaggagttgcctcaaccgtgagtatcaggctagcataatagggatagggacagggttctgacacatcgtattgaaggctctgcacatcactttgtggttgtatttctgcctctgacaggctagggaccagtggttctctaatcatgtaccttacttagaagctccgtgactcaagcatggggatccctttttaaatatctgacatgaagttttgccaggtttctgtgctctgctccagggtatcatgagcagcaggagacctgcacacctgctactgatgttgtcagacatgctttcttcccagggaacactgctcctgaagtcttgtgtgagtgctgtgtggccagtggccaattgcctttccctgtttttcttttccttattactttgagagtgcttttttcctctctgaaacaggatctcactcagtcgcccaggctggagtgcagtggtgtgaatatggctcacttcagccttgacctcctgggcttaagcagtcctcctgccttagcctcctgagtagctgggaccacaggcatgcaccaccactctcggctaattttttttatttttaaatttttgtagagatggagtctcagagcgaaaaaggaaggtattacatataaccacaaaacaaggttaggatgttacgaactagggaaattcccaagaacaagaaagagctcttataaattaaaaacataatataaatgaaaatatgataaagtatggggcaaacaccaaggaacactgcccagaaagtagaacaaaaagataatagattaaaaaattgaggagaaaaccacaagaaaattagagtttcagtcttgatatgaaaaattggagttctagaaagaaaaacaaatggttgagaaaatattatgaaagaaataatgcaatacaatttactggaagtggaggatacaaacttcctgtttgaaagagctgtgagtgaatacacaataaagtcaatgaaaaagagttgtgctaaggtatatcatcctaaaatttcagaacactgggaatttagagaagaacttaaaaagcaaacagattacagacagagaatcaagaatcagaacacccttctcaacagcaataactaggagacagtagaacaatacctttaatattttaggaaaaatggtttccaaccaagaattccctttacagcccaactttcagtcacatggtagaatagagacatttatttttaggatgcagaatgtagaaaacacttcccttctgatgcacactgttttagaaaggatgtggtcttccaaaataggggaataaacagagaaagaatcagatatgggatccaggaaatagggaaccagtcagatgagggcctaaccaaattccttgatgattactgtgtattttgcctagaaagtgtaagggtggaaagggtatgatcctttcttccccatcatggagggtcacagtcagcactcctgtaacaaaagaataagttaactaaggaaagcataacaaatttattatgtgcacacaagtgcatgggagtcatacaaaatatgaacactcaaaagctggatgtgatggcatatgcctgtagtcccagccatttggggaggctgaggcagaagatttgcttgagcccaggagtttgagttcagcctgggcaacatagagagaccctgtctctaaaaacaacaacaacaagaaaagaaaacccaaagagccagacggttgacccttaataccctcttcgttggggagagggaactgggagatataggggtaactgatttttaggggaaatgaatggactcgagagacagaaattaacttgtaaatgattctctttagaatttgaatgagccgagaagcagataatacctagttgaaatgcctgtccactgtgtggttgcattctttagtcttctctgctatagataatttcagggaatatggaaggcaattgtgttcctctttgggtatccagtttctgggcagataatagagcttcagcggagagcctcatcttgtgctttgggagagataacggattgagaggaggaggggaggaggtcagagagaccttgctgctgcttttttagtttagcatgtcaaagtgttatatttctgggtattggtttctgaactgcaaccaaagtaaccagtcctattggaagaagacagagggttccatgaaagatttcttcaacaaaaaatgaaatgaataaaatacatcatgtatttaaatgcattgagaagagatttttttaggcctgtcaggtagcatgggaatgatttagtcataggaatatagaaaactaaacaaaagaaaaatgatgcaaccctcagttctcagtaaacaaaagattgtgcaagataggaaattaagcatagtatactacgtggctcaactttttgttcttcttgttatagagatggggtcttgccctgttgctcaggctggaatgcagtggcacagtcataactcactgcggccttgaactcctaggctcaagtgatcctcctgcatggttcagctttgaacagaggttacatttcataatattgtgaactccaagttttggaaggctggggaaggaaacatgtgggagggcaggtataaggattaagtcttcattttccacataaagtatataaaactgaaataataagacattcgtaggataaacatagtgtttagaaatatgttggcaaattaccagatcaaaaagctaagtttcagtgtggttgcccatggtgagtgagagttggagtgagagagggggctggatgaggcagaagaggccattttgtttttttgtttgtttgtttgtttgaaagatggggtctccttatgctgcccagtctgatcttgaactactgggctcaaacaatcctcctgcctcagcctcctgagtagctgggactacagatgtgcaccactacacccagcttgagacctcactttgatatgtcgttttaatatgtgtctatgcattaatataaaaattaagtgcataaataaaatgtaggctgcgtacagtggttcacatctgtaatccctgcattttggaaggcccaggagggaggatcacttgaggccaggagttagagaccagcagcctgagtaacatagtgagaccccatctctaaattaaaaacaataataataaataacatttaaaaggaattaattaacttatgcaaatttttcacatagatgcagccacttttgactgggttgaaaagtacttggttagagcagggtttcaaagtaacagaaaaattgatgaacaccaaatagtttgacacttcatctgggttgtttattctaagactgcccttggaatggcattaattattcatgcaaacgacttacccatctgaccttcctgcatatgaatactttttttttgtttttaagggctgtggttctggccttgaattcttttttttaatcactattttttagagacaggatctcgttatgttgcacaggctgaacatgaactcctgggctcaaactgtcctcccgacttggcctcctacgtagctgggactacaggcggcactgccaccgcacagctggctcttgaactctttcaagagttgaagactcttctgaggccagacttccaggaaatggcagtagtgcatgagatgtaggaatccttggaagtataactttcagggtctatagacttctgggctactgcagcttctagcagggaggtatgtcctgtacttcagtgagtgactcttattttaactgaaagaagtggtagcagcaggcgcatctccccaaggcttcatagcaatcttaaacccaagctttgcacccaccccagtgttttaaaatttccaaaataataaactctttagggtagggaaaagatctagaccagagatctgcaaattacagcccacatgccagctgcttgtttttgtaaataatgttttaccggaatccagccactcccacttgtttacatatcatccctggctgcttttatgctacaatgaagtggagggttgagtagttgaaacaaagaccttattgcttgcaaagtctgaaataaacacactcacacacactgatttatgtatagaatatgtatacaaatatatcttttatttatctatttttttgagattgagtctcgcttgttgctctgtcgcccaggttggagtgcggtggcaagatcttggctcactgcaacctctgcctcccaggttcaagtgattctcttgtctcagcctcccaagtagctgggattacaggcacatgccgccatgcccagctaatttttgtatttttagtagagatgaggttttgccatgttggccaggctggtctcaaactcctgacttttagtgatccgcctgcctctgcattccaaagtgatgggattataggcgtgagccactgtgcccggcctacaaatatatcttttacagcacatctcaattcctattagctgcatttcaaatgttcagtaggcaccactggctagtatcggctgtattggccaacacagatctaaattgctgtatccttggtactcctacctcctggtaccttatcagaataagcattcaatgaagttaccttgggttaaactggctgcaggtgtggggtaagttagcaaggccaaggtaaagccatttcctttgcaagaaatagacatggacacataatgtaatagtcatgaatgtttatccattaaaacaaaactttagtaaaataaaaaagaaatccaaatatcaaattattgttaaaagtgtcaagtgatacacatggtgtctacctcaggaaagtttatgtgtccacccgctgccttagaggcatttgaaaaagtatagaatgttgccagggtcgctctcaataataattctaacttatgattttgaatttaaattttgggtcccagcggagcagtgctgtgaaagtttcctacctcattgtgtgtctctgtagataatttcctctgcttcctgcatctgttttcttggattagttaggtattatactaaagtctagaattcttttggctgcagagctttctctgctgcttcccttcccccccaacctactttattgtgggtgggaaaatttttgttgggagggcttgattaattagaagggattcctggcttccctagcggtggcagcctgggaagattacagagcctggcttagtgacaggccagtctgtatttaaggaaaaactcggacccgccagatttctctggaatgtgcatctggctttgtcttctacagggaatgtgtaatgatcccctcctctttcttcccacccattccaggaggctaaacgcttttacttttgctcttgatggggttgtctactttttattttgggagaggggagggctggaatttaggggtgggaagcttgagtcgttttctgaatctaaagtaaaagatttaaggttttattaatatttaggaggaaaggagagattttattaaaaaaaaaagaactccctgcatctttactatcaatgtttttctttccactctttcagagcaattatagttttatattcttctctgaatttcagttaaccttagtcttcacattccttagaacaccacaaaaagagaaataagcctaagaattgacaatgatttcccctttatagtaaaagtatagagcagctctttaaactttcagagaaagagacagttgaatggtaaatgggtaatcactaggcttttgtcttgctagtttgcctcaaggaatcacttaaatcctgtgtcctaggttttttcgtctacttaaatgggaacgtggtactgactattatcagtgctcatttgaaaatggctgcgttgattttgtgtatcacattgaaaagatttatgcaattattttcatatcaattgagttctaggtactgatttttctacacattttaagaaagaataaaactgaagtgcctaaacagaataaatcacaaacattttaaatggttatattccttactggaaataactttggagtgtgcaacctttgtcccgaagaatgattttacagagatttgtccctgtgaaacttttaaagtgaaagaagtacctctatatttcttctcctgatacttaaagtctgcatcttccaattcctccttaatttcatgtattccttgtaagagctttatgttttaaagacatacagggtcaatgcgagtttgcagagtggttgatgctatgcccaaactaacataggatgctgttttcccattcagtatcattgttctattgctttgctcatgctggaagctgtatttaagtaagtatgtgctgatttcgtgaaagaattgaaataaaattagtaaaagttttcacaccagcagtcacccaatgagttttatctcaggcttagagcttttagataccttctcactctgtaaggcatctgctctgagtgttgatgactttgaaacaaagttcttggacttgaaattaattttttttttctaagagttctctctgcctttctggccagacacccagttttctaggcttcattttcccagtcctttcctcatgtgataatagataaactagtctgttctttttttggatgactaaaaatgtgtaaatacagctctggcttcttatcctcctttttagtctcaactttccacctgcctccaagaagtttctgcctacattgatccctaaaacttcaaacaaagaactgagtttatcatggctttcatctaagctgatttttgctttgaaagtctctgatgctgcctccacacaccctgggcttgccaaatgatgtctcgtccttcattctttagtcacttactaaacgcattcctgctctgcagagcatcttgaatttactcctcttagaaattcaagcctttattgtccttgtttttatgtccatgttaatctctgaggacctctgtgcctctcttctcttaccattccagttcatctagacaagtgccagggtaatgttttcttaacatcatattcatcatgttacttccttgcttaggtgatcagggtaattccttttgtttaaatggatctaatctgaactctccagctagacgtaaggcattctgataattactctccccttcctttttaacttggacccatgtttgttttcatcttggaactggggaacgtggcccacttattcctgtgaaactaatgcatttgcatttcctgcagtcatctggcttttctgtggttttccctctgtttgctatctctcaccttttcttccttggtccacacccttcagctttttccaagcttgaccagtgaatgacttgctttttctttgttacacatctaaacctttcccatattgatttctctcttgctatgtgtttttttgactgttatgtgcagtttatgttatgttttatatatatttccaatttgttttctttcctaagaacatcatcttgaggtgatatacatctgcttttatatacattatgcctagccacattccctgggaagaaggagctgtcctatgcttctttcatatctgcacagaccttgaataatctaaagcaggggtgtccaatcttttggcttccctgggccacactggaagaagaattgtcttgggccacacataaaatacacttatactaacaatagctttaaaaaaaaatcgcaaaaaaaatctcataatgttttaagaaagtttacacatttgtgttgggctgcattcaaagccatcctgggcagcgagttggacaagtgtggtctaaagcatttctgaagtgcccagtaccccccactttccttgtcccaaagatgacaagtttcttcgtcttggctcatagagaacagggaagtcactccagctttggattatttcttactggtctttttttcagttccagtcagggaatgttgtaatcttcaatttgtggtatatttgtttttttaaaaaaaaaatcatctcaacctatttctccttttaggagtccacagttccactttgaaaatatttttaataattcttttgaaaataatctctattaataatcaagatgacaatccatagaatttgcttctatatgcttcagaaaagtaaaatgtttcagtataatggttttgattgtctagacattatattttattttaataatttcttagtgttagaccttgatacttttaattttttccaacatatgtacaaagcatgtgtttttattacttattctagtgtaaaaattaattcttaccagaaaagtaaactcaggatctcttaccaaatagatgaactcagtaagcaccttggattctctctgagggctgtagggggcatcattgttccaatgttttataaagtatcttcccgctgtgatctaaagaagcacagcaactaaagtgcttttacagtcgttggctcgtgcccacgttactatgacatcctaaatgcctgtttgtttgcctggtggttgtatgtgcacacttgcatccctagccttttatgaatgtgtatatttagattgcttctgtcatagagtcctcctcactaggatgtaccaccaccaaacaccgagggaagacagtcccaacgacgaaaactatccaaagtggccccagggaaagcattctcagagtgacacaagactgcctcttcagtacttcctttccagattcaggaacctggagatgatggtcggagagtaaggatcctctttgtcctttgaaagctttgggaccccagttccgccctggtcccagcagtaagggctggagggggccagtcgagtctggaaagaaatccttgaagtcatagttttattaccattactgctcatccgactcacctttcctttttgttattattactcttagtttgggggatgcttggttgagaaagtgagggatggggtagcgattgagagtgtccttgcaatttacagtcccagagaattccatggaaatgacattccattgaaatggcaaaaacgtacagcagcgtagccgtcattagccaaataatgtaacgatgcatagtgtttgctaattgtgctttgagatacttctctagtagtaggctcttggaatatccatgattaagtaatacaggaagctaggcctctatatgtgtcactttgtcccatgtgagtgtcatgtgacaaaaacactgattttcagactgttggaaataatcaggttattaatagttaccttaaacactcacatacacacatgcacacacttgtgctatattttgcgagtttaatatgaggtgaaaaaagaatgtcatgctgtttgttccacagtggaatagcattatatagattctggtaaggtatgtaccaggtctagcatccggatccttattacctgaaaaattcaccatatgttactgattagtattgagatcatgtctggttctaaatttttgtggttctctaaatctattcattttactctaggttctttgatagcacttcttgaaatttagatcatcaagtctttgaggaaaggattctagaaaattaaaatatcagacttttaatcaggattcctgaatgcatgttgtggtttcacttttgaaaactggatgactttgggtgaattttattacccctttgagcatcttatttcttcagctataaggtaggattaacagcagtgtctgttttacagggtttcttttggatatcaaattaatataaaagacataatgctgtgaaagtgggaaaataacattttatgcatgtcttaggctgtcagtaattattttattatcttacagtgacatgctgtatggtatttgagggacttggccttgacttatttgttcctggtctcataattcttgggagtgaggagtagtctaattcttttcatatgtgagggctcaattagcaaatctttatttatcctcatcatgcaaggccctgggttaggcactatagacacagatgaggctgatgattgcccatccctaacctcaggtagtttgcagtgagaaattaatgtgtcaaactaatatcattaaataaaggttagtgaaaaagagataccagagcacccagcatagctgggttatgaccagatgagcccagtaatttttttcagacatgtttctgaatgggatgttgtggaaaagccatagggcagccagtctgttgggtgcactatttgttaatcagtttatactttgggctacagtggcaggtggtcaggattagaagttagggttgttagattttagtccttgctattgattcctatctaggggcaagtcagctagcctcttttgtttccgttatctgtatctgtgtgacaaagaagccccactattctcatatttcaatgggtcagaaaatccagctgggcagtttttctgctttatttgtctttggctggggtcaatcactcagatgcatttggttactgaccaggctacaaagctctagaagacttcactcacatgtttagttcttctcaatgataccctctctcttcacaaggtgtctcatcactcagtaatctggcttgagctcccttacaacatggcatctagcttccccagagcacatgaaagtggaagctgccagcttcctaagggctacctctggaactggcacactattatttccactgtattctattgggcagcaaatcacaaggtcaagaggagaggaaataactgcctcttgatggaaggagcagcgtacctccagaggagggaagggattgttggtggccatctttggaaattgtttagtgtagttttcttatttgtttattatagttttcttatctattaaatgagatgttgaattagggagtttctaagggcctgtcaaactctacatttccgtaatactatacttttttttttttttgagatggagtctggctctgtcgcccaggctcgagtgcagtggcacgatctcggcttactgcaacctgtgcctcccaggttcacgctattctcctgccttagcctcccgagtagctgggactacagtcgcctgccaccacgcccggctaattttttgtatttttagtagagacagagtttcacagtgttagccaggatggtcttgatctcctgacctcgtgatctgcgtgccttggactcccaaagtgctgggattacagacgtgaaccaccatgcccggcctggtaatactatacatttttatttaagggatttttgtgtgcatggtataatggaaataatttggcctttggaggcagaaaggcctgggtttgaaccagggccttaagattgaccagcaccttgggaagtgacttgagtctttctgagcttttgtacacatctgttaaataatagggttaattaaataggattaatgttaactcacttctataataattgtccatcttagcacagagtcacgacccagaaggtgttagcacccatcccttttcccttctttgttacctgatacaggccttttaaagccaacaatagttaaagatattcattgaggtttttttgttttgttttgtttcattcaagtataaaaatgtttaggtgtttaattgtgttttgcagatgctggcttatttttctaagaccaggagttcaaacaaaactgttaagtttgtttatctgttttgttgttataaattgtccttagaacattgttgctattaagaaagcaggcttaaaaataacttaatttgaaaaatgcattttggtctgtgaacagctgagttatttggcattctagtaacttttgtctggaagaaaaaaatagctgtggggcatggccagcattcggtctggctgttatacgctgtggtggtacttagcttgtgaaccaggcctgataggtgagactgggcatgcacttctactcacaggctaaatggttgaaaccactggggtcagaaagctcagcaactaagggcagtaggagaaaagaaaatctctgttgtctctaaagcactggttctcagtgtattccctggaccagcagcattagtatctcccacagtcattgcagtgattttattgtactggttattgagagggttaaataaaaggattcgtataaagtgtttagcacagtaccaagtaaccattttagtaagtgttaggcattattagtaatattcatcttcattgtcataaatattgataatcattgtggttaatatttttctgccagagtgtgtcttgaagcagcttattctgcaattcttcttaaaactgccagagttctgtttcttttttttttttttgagacagagtctcactgtgtcacccaggctggaatgcagtggtgtaatcacggctcactgcaaccttcacctcccaggttcaagcaattctcctgcctcagcctcccaagtagctgggattacaggcgcctgccaccacgcctggctaatttttaaaaaatgtttagtagagacggggtttcaccatgttggcccggctggttggtcttctttttttttttgaaaggagtcttgctctgtcgcccaggctagagtgtggtggcgtgatcttggctcactgcaacctccgcctcatgggttcaggcgattctcctgcttcagccttccaagtagctgggattacagacacacgccaccatgcctggctaatttttgtatttttagtagagatgggatttcaccatgttggccagactggtctcaaactcctgacctcagatgacccacctgcctcagcattccaaagtgctgggattacaggcgtgagccacggtgctcggcctcaggctggtcttgaactcctgacctgaggtgatccatcctccttggcctcccaaagtgctgggtttacaggcatgagccaccattcctggccaaagctgcctgagttctgattagttctttttaaaagcttatgaatggtgtgctggtctaacaatatttcaagttgtcaagtaagaaggagcttcttacaaaagcccatcgttctgaacaagatattcttcagtccaaaataatattgagagatcacataacacagctatgcagatatattctaagccctaacttcgtgggagtcattaatgccatttaatgaggccccatacaatgtctgaactctggagtttgcttttaagagccattctttcctagacccccttcccttctttactttaggtattgatgtcctccatttacatctctgtggagttttttcctttttcttttttcccccgctcccatttgtggtcaaataaggatcatggttaaccccagaaggaaggccagatgggccttgggggcctgggctggggctggagcctctccacttccgccggccgccttgttcacttcctttttttccctcccttaccactatgttgcagccaaacttccgaagtgaaaagcagtttattccatctaatcggggctgctgaatcagaggtgttgggggtgttccctgggatgatgctgccctttggccactgatctctgtatcatagcttacctcggcctccctctggcgccaccatccaggactggaagcatttgcttttcctcagggagccgtgggttcaggccatgggtggtgagagagtctcatcttctccagcttcctggtcctcagacttgagtaacactccttatcctctgtctgttgccttctttgggcaagcacgtggagccgctcaagtaaagctgctcttcattgggaatattatctgccaaggctaagccaggatccctagagagcatccaagtcagggctttcagcagagttccctggaagcactgcattctgtggagggccagagccagatccctgtctctgctccagccgacagctcggccaccatcagtttggtgtattgaggtcatgcatagaatttaacattgaaaaacatccttgttcagctccttcagtgatgagatgagaatccctggggagtggaaagtgaggatctcagaagttgcccaagggaacttagtgtcttatttagagtcataataactagcttagactagcgtaactgctagtcaaggctctttggaaggaagtaacacccacgcaaactactagaacttgaaatgggcagtttatgataagggagtgtgactgtctcagcatactggcatcagtgtgctattgagctggtgagggcctggaggtagcttcaggttgcccatggccctgaggcagcttcactgtgggcctctctttgagaagtgggattctggtctttgcatcttccttgttattctccctctgctggcctctctctgctcctttgttcatgttgcagaagatagtggctcctcacctcccaagtgacatatcctacaaaactgctgcactttctgccccaatagcaaacttctggaggtgaatttgggcagatgtccacttttgcttcatcgattgtggcacggggcagtgtcacatggtaaatacatggctgcccatgcccacccttgagcatgacagctgtcagaaagaggggcatagattcccccagaagttacatgatagtactttacaatttagagactttgctggaaagtttctttttggcagtctcatagacaggcctttttacagaacatagtaatgagcacttacagtttgtagagaggcctcgggggcatccaagaggtagctggaataatctgacccttgagaagcttctcttggttcctggggatgacgatggtcataattaactgctttacttacaacttggcaatgtgttttattatcggtgtgcattttgaagtgttttaaggtttttcacatccctcactgtgtgtgtgtgtgtatatatatatctgttatgataattaaaccaaatattgtaaaagtcaagaaaagtgtcaaagaggatgtcattctactaaacttttttgaatggctactctttgatgatcttgtgagttgggagaggacccaaccttcagtagcatgaatctggtcttaaatcttaaattttgaagcactgaatgcattgcaaagtgtcccatagtcatctatgagtgtgcatatttgcttttgactcagcattccatttgtacttcctccacaacaaaaaatgcattgtagctttagtatttttaattgtcaccaagtagtactgctagccattgtgcaaagtctaccaacagctgataaaatgattacatttttaaaggttgctggatggaatcagatgttgctgtatcagttcctatgccgcgtgtgtctgtttcacttcccataatgactgattctccacctgccatgacagtgcattcttgatctgctgcgccctccttgggttggggactggaatatttatttttaggaaaagttaaaattatccagagaagggtgctttctgtaaaatttacatgaatcagcctcttattgcagagatcatgggagatgtgtgtgtgtgtagataaaaaaaactcaatggaaaaatgtaaaactgttaaagggaaggaatataatgaacattgttttacccatcactatctttaacattgtgggcacttttaaattaactagtattcaaactaaatgtgtgtttaataaaagtgaatggtactacataacattaatgcttttgcagttaagctagattttccaaatttcagcaaaaccaagagtcttagctccttccttcagtcttcagtttaaattctaagaaatattattcgaagtttaagaggtcttattagggcattaatgtgggttttcccgtatcaagagcagacacaggtttttggtgtcttaggttctaaagataccagtgttccttagatttctgacctgactgtgaagggaattctcttttttttttgagacggagtttcgctcttttagtggcatgatttcggctcactgcaacctccgcctcctgggttcaagtgattcttctgcctcagcctcctgagtagctgggttacaggtatgcaccaccacgcctggctaatttttgtatttttagtagagacgggatttcaccatgttggtcaggctggtctcaaactcttgacctcatgatctgctcacgttggcctcccaaagtgctaggattacaggcatgagctgattttttgtgtttttagtagaaatggggtttaaccatgttagccaggctggtcttgaactcctgacctcaggtgatccgcttgcctctgcctcccaaagtgctgggattacaggcgtgagccaccgtgcccggccgaagggaattcttgttaggctattgcacagttgtcagatggacctgactgcttctcatctctaggatcttggttccttctctccaatatggggataataagtgtcaatcttcatggggttgttacataaaaggtttctaacacaatgcctggcaactggtaagcatttaccaaataaataagccttagcttaattagtaatcaaagataccagctgggaaacatatctattttaagattatataggctccttctcatcctctttgggcattttatttcagctgcttaagatgtgaaatctgtgtgttgtggtgttccttgttacaatctccctttttttttttttttttgaaacggagtcttgctctatcgcccatgctggagtgggagtggcgtgatcttggctcactgcaacctccgcttcccaggttcaagcaattctcctgcctcagcctccagagtagctgggactacaggtgcactctgccacgcctggctaattttttgtattttagtagagatggggtttcaccgtgttgcccaggctggtcttgaactcctgagctcaggcattccacccgcctcagcctcccaaagtgctcggattacaggtgtgagccaccgcgcccggccaagctctcttttaaaagctttttttgtgacagcaaaagaaagggagctaagattgactacctaataaagtaggtgtttttcacattttcatgtgtttcctatttagttcagtaggtgtttttcctgtttagttctcacaacactgtgaagtacatgttactgttgacatgtcacagatgtgacaggcagtgagattgagtaatttgctcagttgggaggtagagaatgtgaaaagcaggtttcaagcctggggtctctgactcaaaggcatatgctttgatgaagatcgaaactctagctacaagcttgtgaagatattaatttagaatcatccttgtccagtaataacacaactacttatagtggtttgtaattttaaacattttattaatattaactatattacatttactaaccatgttaaaatatgttctcttgggaggtaggcagcacaggtaacattgttaaagaaggggccctggagcctctgattcttgttctttattgtccttgcccctcagtaaaaaatcctttaggaaaacagatgcgttgatgactgtgctggtcaaaggtcaattttggaccccagactcctttgtaaaagcttaatgaatctgaccaactcttctaagctcttctagaggtagctgccactcccaagggagagattcttgagctcctttggcttaccaagtgggatggggtgagatggtatgcaaagagggaaggtgaaagaaagaagggggtcagtcttggagaaaaaggcgtattacctctattcaggtagaagcaagagaaaactgcctaaaacctgggattccagggatgagcttgccaatcctccccctactcaggcctctgcccagattcgggactggcattggagaaggagttagggagaccttgagaagtggttaggacggtggactccacctagaggcaagtagtgactctgattccttcccatatgacaaaccagccttctgggaaaggtgaggacagtctgggtaagtcatctgcggatgcaaaatgaaaatctgtattgtataacttctagggtcttagtatacttctttttttgtttggtaaattaaaaactgaaatgcataaagaagaaaaatttccatattctcatcgctcaaattccatatttcttttttttttttttttttgagatggagtctcactctgtcacccaggctggagtacagtggcacaatctcagctcactgcaacctccgcctcctgggttcaagcaattcttctgcctcagcctcctgagtagctgagactacaggcgtgcaccaccacgctcagctaattttttgtatttttagtagacgggatttcaccatgttggccaggctggtcttgaactcctgaccttgtgatccgcctgccttggctcccaaagtcctgggattacaggcgtgagccacgtcccggctcgaattgcatatttctattactgttaacatgttacagtattatcatccaggctcttatttaaaaacaggcaaacagaggccgggtgtggtggctcacgcctgtaatcccagcactttggaaggctgaggcaggtggattacaaggtcaggagattgagaccatcctggccaatgtggtgaaaccccgcctctactaaaaacacaaaaattagctgggcgtggtggtgggtgcctgtaatcccagccactcgggaggctgaggcaggagaatcccttgaaccagggcgtcagaggttgcagtgagccaagatggcgccattgcactccagcctggcgacagagtgagactccatctagaacaaacaaacaaacaaagcaggtaaacagatgaacaaaacttgttttataaaaaatgacctatttatttttattatgaataattcaaagaagaaaaagtagtcactcggttgggtgcggtggctcacgcctgtaatcccagcatttggggggctgaggtgggcagaacgcttgaacccaggagtctgagaccagcctgggcaacacggtgaaatcctgtctctacaaaaaaatacaaaatattaaccaggcatggtggcatgcacctgtggtcccagctactgggggattggggccgagatgggaggatcacctgagcctgggaggttgaggctgcagtgagttgtgattgagctactacactctagcctagagttttggaaacagcaggaccctgtttccaaaaaaaaaaaaggaaaatcagtccaaataacttgatagtgttaaaagaacatcattccggatgtgtactgtagattatatcatatgtacagatggaatgattacaattaaaggtagaaatacttttgttaaatatggcatattatagctattgttttaactaaaaatataaaacgtgattttactttaacaatagataaaagaagaattgaaatataaggaattgctgaacctcaaatttctttttctcatgtagattttcctataagatttctttgaaattaaaatagcctagaaataaataggttgaactgatttttaaaaaattaaatttcagttttagatactagtgattgatttctacattgtaagtatttcatttccggaattgtttcatgcttgagaacgtgtcctctttgcctttatatttgaatgatgctttagctgggtgtagtagtcttggctcttactttctttctctcagagctttgtaacaacattttcaccactattatctgatattgaatattgctctggggaaatgcaaagccaacttaatatctccctattatataggtgacttgttttttgttttggatatctagaagactttgtatttgtccttgaagtataaaagcttaactataacatctctcagtgtggaatattcttacaactttttttttttttaaattttgatatgtgtacttgttttggtatgttcattcttcagagacattcttttttaaaaaaggtttgtataaatttagggggttcaagtgcagttttgttacctggatatattgtatagtggtgatgtctaagttttactgttaaaggaaaagaaatcactctattgaaaagatggctgcacttgtatgtttatagcatcactattcacagcaggaaagatatggagtcatcttaagtgtccagagagattcttacattgtctcatatcttggaatccattgtctgttccatttcttaagttgtcttcttcagggatctgttctcctattagattatttttatctgcctttcatttttattagcttttctctaattgcttcaatttccttgtttattttattattttaaaatttgaatttgccatgattatgcaaactttctcactgtcagtaaattagttttcagggatgtcagcatcttgtttgtcttgttttcccttatatattaatgctatagtaacgctgactttgattctcaatttatttccttattttccctatgttggttacctatttctggtcaccaaattaccccagaatttagcagcttatattgactcacaatttttatggcttagacatacaggcatagcttagctgagagccccttgctcagggtctctcacaagccttcaaccggaatgtcagccagggcagcattgttcttaacgctcagtcgcggggaggatctatttctaagttcactcttgggtgctccccagctgttggctggagacatctgtttctcaacaagtggtcctctccataaggcaactcacaacatgcggctggctttcctcagagcaagcaagagagggtgcccaagatggaagccacagtctttttgaaatctaatcccaaagtgatatcccataatcatctctgtcacattctatttgctagaagcaaaacactcaagaggagcagattatataagggtgtgaaaaccaggaggcagggatcagtgggggccacttagaagctgtcttccaagctccctttttcattttactttggtcataaaactttgggttctcgattgattgattttttcctgcttttcctacggctctaagtgccttaagcaattggtttctcatattatgtttccttttgggttggacatgtgcctttttgcattgtgcttttggtagaatcacagtgaaagccatgccatttaatttaatcgtggtcttatgcggctctttcatgcattctatttgttttgatatcatgtgagtgactttatagtcttccctctttatctgaggccagtttgatttttcttcaagctaagtttgaggactgggtatttttggcttgatcactttcctgagcctgtaaagaatggtccctggaggaagcaagcacagttgaggtgaggtggttatacactagatgcctggatcctactctcttctgaggttgtactagaggtactgtgtcagggtttactccttgttggggagagtggggtagggtgagatcctctgccatgggaacatcctccctgttgttaactctgcctcccaaatagccattccctatacttcatagaaggaaagcgtatttgcagaagtgggcaaatgggctaagagaccttttagaagtgttctaaaactagattatggtgacaattgcacaactgtataaatttactaaaactcatcagactggaaacttaaaacaggtgaattttacgacataaaattgtaccttaataaacctatttttagaagccatatctgtttagtgtgcatttttcccgagttagaggcattaataagaattttcagaatggtgatgatgcaccagtcccagccattcactgttcatgtttattcatttattagagcatacactgttcatgtttattcatttattatctatagtgatacgttatctatgtattatctatatatcaccacagataaaattaacaacagaaagataagttttttgtttgttcgtttgtttgttttgagacagtctcgctctgttgcccaggctagagtaaagtgacgtgatctcagctaactgcaaccccagccccctgggttcaaacaattctcgtgcctcagcctcatgagtaggtgggattacaggagagtgccaccatgcctgactagttctttagtatttttagtagatgcggggtttcactatgttggccatgctggttttgaacgcctggcctcaagtaatccacccacctaggcctcccaaagtgctgggattacatgcatgagccactgcgcttgtccaagaaaggtaattttgtaattagtatgggatgagttagtttgttctctttagttttactagcaaacaaaatgattatcaagaaagttctatagtattgattgggtaatacataaatgaagaattcctcatgaatgttgcaaaaatgcaaattaattttaattacatattacaatttaattttaaatttttaaatgtttaattacatattaaaatcctgactataaaaaaactagtagcaaaaaggaaaccattttaagataatgctttcccaaaaggagtctatgataatgatggagttcaggccatgcgaccccaaagtatggcacatgtgaaaacagcagaagcattagttcattttcccctccccccacccttctcttctaaaggaggtcataaaacctaggaaggagtttctgaccttcctctgaagcaaatcgtaagaccttatttgagaagtgccctctctatacccagaggaaaggaacatccttatctctgaatacaaagggtcacagagaaaagtctgaacaaacatactttgctatgtttcctccagtttattaccattagatcatacttttaaatctaatcttacttatccacaactatccacttattcatcaaacctagcataaaaatatacacatttactcctatattcagatcttcatttccttaggaaggctcccatgtcacacttatattaagtaaatttatgtgcttttctctcgttaatttgtcttttgttttaggggcctcagtcatgaacctaagataagtaagggaaagatatttttcctcccctacaatgagatagccttttatttattcattctgatagcaaaatatagcatctagtagagtcagatcttgatggtctttaggttatagatagatacattgtcagtgaaggaattagtgtatagtgtcactgaagaaatagccttcacttcctcctttagctaggagtttcattcacttatctaagaagtatcttgaggggagctcattgctttggtatctattagtagtatgccaaaaagaaatatggccagcttctcaatggtcagctttttagtaaatagatgggtgaagacttctctctgcttgtcactgtgtgaggcacacagtgataccaaaattgtgaggtcattgagggaaaggctatgtctgatgaattcgtttcacatctccagtttttaatataggtgctccataaatatttaatgcctaagtgaatgaaagaataagtaagacatagtcctcacccttaagaaaagatatgcttttattatcctcaagaaaagtatatgctagttagacaactaagtcatacacatatgaaaaagatagctagtaacacagggcctcatataatcccaagtattcaaattgtccatatagtgcctgaagaagatgacagtggcttggactgctcagaaaagcctgtggagttggtggtacccatgtgggtacacctgaattcctgacaaagaacagagaatgcacacagggagagtgcactcagaaatgaaggtagaaatgaagatggcttgaatgggggacctcgaagagacagggctcactgaagccaaggggagacctgggaaacagagttggatggaaagagtgactgaagattgtagaggggctttaaagcccaacatacgagattagccttatatttttaggcattagggaatcaatgggttcttgagtcaagaaatgattacattaaaatttacaagcttgttggggttattgattgaccacatggataattgggctgttttttgtatctcttatgtgcaagatgcttatacagttgacccttgaataacatgggggttagggctactgactctctctatgcagttgaaaatccacatacaacttttggttgggcatggtggttcatgcctgtaaacccagcactttgggaggctgaggctggcagatcatttgaggccaggagttcaagaccagctggccaacacggtgaaaccctttctctactacactgtctctactaaaaaaacaaaacattagccgggcatggtagtgcacacctgtaatcccagctactcagaagactgaggcaggagaatcgcttgaacccaggaggtggagtttgcattgagcccgagatcgcaccactacacttcattcagcctgggtgacaaaggagactctgtcaaaaaaaaaaaaaaatcactgataacttttgactcccccaaaacttaactactaatagcctagtgttgaccaggagccttactgataacataaatagtccattaacacatatttttatgttatatgtactatatactgtatgcttattatatagtaaactagagaacatatactgtatgcttattatttagtaaactagagaaaaaaggttaagaagatcataaggaagagataatatagttactgtttgttaaatggaagtagatcgtcataaagatcttcatccttgttatcttcatattgagtcggtggaagaagaggaggggttggtcttgctgtctcaggggtggtggaggcagaagaagtggaggaggtaggataggcaggagaggcaggcaccctcggtataacattattggaaaaatctaggtacaaatggacccatgcatttcaaactcatgttgttcaagggttaactgtatattcaagagggtttgtttatttagttcttagttttctttttgtttggcatcttaactaaaataattatcaactccttgcttaaattttttttttttttttttactaggtaggcatcctaacacagtcttgcaaaaaattgttttatttgaaacattcaggctgaaattaattgagggcatgttatatgcaggacatcacataacatgttgtgaaggagttcagagatgaagacattaccatgcacagagtggttagactattagaacggtagtgatgaaatgctgctggagttgacaggaagagaaggagctctttgtacctgaagaatcaagaactgaaagagatggaactggtgtgccaggctctttcctatatactttccttaaaccctcacaacaccctggtaaaatttttaattcctacatacatacagaggagaaatgaggtttagggggctaaatacgcatgtgaacatgcgtatttaaatcataggttgggacaaatttgcaaatagaggaaatatagacaggaaaggccatcagttcatataaaatagcttgttattgtttatatcttctctgggataaatgatcatgcagagtatatagccaggatagcccaatgtccctgtttacaaaattttaaattctaagatagttaatagcccttcaaatattacttgaaatcaacttacattaaacgttcaaccctagcaaagatttcttagaacatttaaaaattgttcttttgaaaggattctagcctgaaagaaaattctgttagaagaaagtaatgcctgaatctctacattcaaacttgctctgtttttttttttgaataatctcttgagggtacagttaagtgttgattgttcatttgatcaattgattctgattcacttcagttttttgggcgttcacatctcactcagtaaacagaggtttggattagagccgcctgcacgcttttctaactctgaatgcctctgttctctgtagaaaactattccttaaagcagtagctctttaagagttaaaaacaaaaacaacaacaacaaaatcaacatccagtctagtcctgctcagctcttatttattcacttttggaactgtgatacttgttagatcttgtgcagtaaaacataactcccagttttccaaggccagctgtagatcaggattctaaaggccttaatggaaaagggtgggtcatgtgtttgtcaagaggccacttagagaaatcatttccatgtaatttttaatacagttctttggatagactttttatgactcagtattacagatgtcattaatttgtaatggaaaatagtgagacaatatgacaattatcttcagactcaggcatacttaggcagcagggtgagtgatgattgaactgttctaacagttaggttgctgcaaagtgccactgccgggatgaagctctcagccgaagcactgatgttgcaacccagccatggacctgggtgtcttgattagtcagccacttgatatgtaacttgggcagcagaaggagactgagacctgttgggaatctgagggccttgaggtttcttctcgcacacatgtttcttttccaggcatgctgagatgctcgagagggcggtcttgggcaaaatgggagagtagatttaagttgtttttcttccagtcatatttcttgcatgttcgctgaacagtaggtattttagacatgagggcaggcatattgcagaaatatttcaggcatttttgtgagggaggaagttaggatacattggtgaacattagtgaccaaatggaatgatgatttccttttcctggcatttgaatgtttcattgtcctttgtgagatatcagttttttgtgggcggaagtcatttctgactttgtaagtaggacctatcagctgtggtagcagagaaatcttatgaataagaaaggccactgtcatgcattgggagacctgggttctctccccaggtcccaacagagttctgctcatagtccttattatgggttgaaatatcccttcccaaaaatgtatgttgacattctaacccttcaggacctcagaatgtgaccttatttggaaacagagtctgtaaagaggtaaatgaggtcactagggtgaaccctaaaccaatatgactgatgttcctatagaaaggggacatttggacacagagacagcacacacagagggaagatgatgtgaagacacaaggataatgccatcaacaagccaaggaacacctgaggctaccaggagctaggagaagaggcatggaacaaattttccctcatatccatactcagaaggaaccaaccctgctgacaccttaatttcagcttctggcctctagaactgtgagagagtacatttctcttggtttaagccaagagaatctgtcttttggtactttatatcatagcctcaggaagcaaatacagccctgattccttcaaagttgtaaaatgctgagcaagcctctcagtctcctcgtcttctgcttccttatttgtaaaataacagtattggggtagatgatgtcaggaccttcctgctctgacatctgatgattaacacttcaaagagtgcatttcatttccagagaagtaattgttatatttcttaatatagctaaaataagcaaagaatatgtttttttcagttcccaattttttttcttttcattcaagagtcattggtgatagacacttcccttgagctgaaatattgggcaaggctgtccatttcaagttgacacactgaacaaatgacagcatgtctagtctgtacatgattataatatataaccaaagaacataccacttaaaagcatatagctgttttctgctggtttggggttagcatagtttggatgtcatttcatgaattttccttccctagatttgtagaatgatttcttttagacgtccacaggcttgttctagttttcacaagggaacctgcccatagaaacaagccactcaggtatttgctagatgccttacctccataaacagtagtgcagcagcagcctggaatcgtgaagtgtagttcatgccaaacgttcacataagtcgaggagttctgtatggggtcattcttcttacttgacttgtcattaggttatagttcggtccactaatgtagacaaatcaagacattgtacttggtgctgtcccagaggaaagcagtgaggaaaccaccacccccctcttcaccagttatctttccctacaaaatgggcagctgaaacccacaagatacattttaaataataccacctaaggccttctctttagattttatttttctcttgcttttcctttagttcctaagttatagtggataattttttttaatgggccttaaacttgccatttgactcaaagtatagagaggaaatctttaaaacaagatgtatgaaatgtttgataccatttgcccttctgtctaaggctctcttcctaatttccccagaacccttttataccttcttgctctgtaaaaatattccctctcctcaacgtgctagcacaagagtaaggggtcaggttaggcttagggatagaatttagaaggggagtgggattacccatggtgacatgtgtctggatgggcctcaatggcttctatttcctttgtactcctcagtgagagggaaagggaaatggttaacatgaggacagtttctctgaattcagctaagttaagatagtggtattattcacacatttaatgaagcttacttggttctttaagaattaccgagttatcttctgaaggtgttttaacacatgcaaatgtttaaatctggtctctgatttaaattttcttctgcacttaactctaccccacccatacatctttcataggtaaaaacagggaagggccaaaaaagttcttagtgttaatatctaattctaaggaggccatgatgaatcacctgtatggattatgaatgacacaccttggaaaaactctatcaccatgaaaggccttaaaaaagaatccctatcatgcaaacctaaagaacatgtttcaaaaggagatatttttagtatttaaagtagtggaaatttcttttttttttagactaaaactaactttggataagtccatgtataaaattctttatgagtatttataatatcattttgtttatgaataaaatataataattaaaatattccatttccgggtctgtcccagaatcctccttcatgctggttctgtctcctcagtggcttagagcagtggtaacaaagatgttcagcttaatttgggtccgtgtgtcttcctgtaacatctttctatagtgtgaaatgtgggttaaaaataagtcatcccctcccaccccctgctttagattaagattcacagtctcatagaaccttctgacctcacattgagactggtcactcagttagtttgtgaattttcctgactctacttcctgctctttttttgggtaacctattgttttggcattttatttctttgtgccttttccagaggatccagaaagaatggagagacttgaaacccaacccatctgtgttgctgttagttaatagaggttgaaaagatttggtaggtctgcagtttgaaattattggccatatagtgacttacagtgtttttttcaccattgttttgtggtttatttgagagtctctgtccattctccttctccctgtgaacatggcttctggtggtgagagccagtttgcattcattctttgatgtgaatgctctgattcagtagctctcaacttgttttctgctacaacacagatggctttcacatgcctcacaccctcacaggggggtatccagggttatgcaaaattgaagcaagctacttgtaattccacccctctcttccccattcaggatagtccaggagaaagcaaacaagagagtggttttgtcacgttgctgtcagtaggctccactttaaaaaaaaacacaggttgttacacactttggtacttgcctcttgtcttgctttgtcacttgcagatgtaattctttaaaataatttgtgttttaaatacttaataaaatggctaatcgcataaggaacacccttgtacttatttcgcagtttaaacatttcatcacattttgccaaacataatacccatcaactcttcttaaaggaaatgaagaaattaatgcctttatattttctcctatttctccctcaactcccctgtttttttctcatattcttactttgtgcagccaagtaatcatattcatgattctcagctctaacgttcttcagagctttcggaccttgctcctttgtcttctccatgaaccagtgtggagaagcattaaagtcatctcaggtttcccccatttcaactcaattttgctgtctgcacaactagagaatgttcaagttccagaacctaaccatctttttagcaattatgcttatcacttttccccaaagcatggtgcatcttttacatctgaagattactttcttttttaattccaaaagtgattctcttattaaatctttaaacttatgtgttatgtaataatttgatacatattgaataatatttatcatgtttatggaaactatgaggcataattatttcaaaagaattcaagaactcattgttcaacgtaatagtatctactggtatcattgggttaaaaaattgtaaatatattttaatacccgtgtatgtctcctcaacctataaactcctcacttaccccagaagtaacagttttcctgaatttggtatgttttatttctatatacattttcctgccttttctacaagcaaatgtgctcataaacaacatttggtattgatttgcacattttcaaagttagtataaatggtacatgctgtgcatagtattaggcagtctgcttttactactcattgttatgttggctgtggatacatgtagctttagtgaaggatctgctacatagttttcctttttataactctatgccatttatttacccgtttctgctgaatgtttaagttttccctaattttgtgctattcccaacagtttgtgatgaatgttcttgggtgtgtgaatagggagaaggtgcacagaaatactggctgctgtaggggatgtgtcctggagtgggattgcagaactacagaacatgactcaggctcagcctcagcctcactggacagtgtaaattactctccacagtagttgcgtcagtttcccctcccaccagccatatgagaatttccttttcttcatatctttgggaattcttggtattgctagaatttttactttttccaatcttatgggtgtgaagtgatatcttactgtttatttttatttcttttgttgatacctggttcatatcttttactcatttttctgcaggactgtttgttgttatcttttgacataactgctatctatatagtgatcttttgtcatttatatttgttataaatactaatctgtgacttgtctttttactttgtctccagtgtctttgttgaaaagaagttttaaattctaatatggactgatatatcagtcttttatggtttgtactttttaggtctgcttgaaagtatctttccaaccaaaatgtatctaatatattcttcaaaaattttaggtttttgaaaatatttagttctttaattcatctggtatagtttttacttcccaatggataattagttatctcagaacagcttatcctttccccgttgaagtgtaatgttcctctgtcatatagtatgattctaaatagacatattttttatgtacacattatcatttgtctctttctatgctaataccaactgttttgattactgtaacattatcacaagtcttttttttttaagagatggggtcttgctatgttggccaggctggtctcaaactcctggcctcaagcagtcctcctgccttggcctcccacagtgctgtgattgcaagtgtgagccactgcccctggtggtatgtcttttcatctagcagaacaaatctttctacttttttctttttcaacattgccttggctactctgtgacctttgatcttccttaaacatttgggattttgatttaagtaatattgagttcgtagattaattggggagcattgcagtcttatgattctgagtcttgtctttgaactaggtccatagaggccttaaataagattttttattaggtctgtttccaggcatttttttcgttgttgctactataaattggatattttattctattacattttataatagattatcacaggatttaggacaattattcattttttagattgatgttgaaaccaccaaccatatcgaactcccatattttaatagtttttccaagattcttttgaatattttatgtatagtcaacatctacagataaggtaacttttgtctctttcattaagttcttttttttcagcccttttaaatgcatgaacattcaattcttatatatccattttctatttcttgaattattgcattgcctaggaccaatgcaatgtgaatagaagatgtagtggttattcctgtcttgtgcctgactttaatggaaataattttaaagccttactattaagagcaatgtctgcgtcaggctttgatacataacacattttagatgaaaaatgtttcctactggtctactttgcaactatgttgtcttgaaaatgagtgttaaactttactgaagtgttttttttatagttgccttttttttttttttttttttttgagtcagggtcttactgtgttacccagactggtctcaaacctttggcctcaagtgatcctcctgctttggcctcccaaagttctgggattacaggaatgagccaccacacctggacttgaagactttttaagagcatttattgagatgatcgtattttatcctttaatatctcaatacggcatttagtagatgtgttgatcttacaattcctgggataaactctgctttgctttgacagtataatttagcattattgaaactttttatgaatgagctttctttttttgttgttgttgactttgttactaatctcgttaaatgatggatcacccctttaaaagtattctgtaatagtttgtaattatccattttttgaagacttcataaaactctctcgtgaaactgcctgggcctgtggttctagggcggaggatggaaataaagctttttgattatttaagattattattatttatattactgttataatatcattattatatttatattattataagtttctttaatgcttattggtttgtatacaatataatgcttttgagtctgttattaatatttttctagaaaaagttatttcatctgtttttagatatattgacatagaattgagttatagttttctcttttaattaaataaaactctgtatttaacattatcctcctttttatccaatattgtttatttgtgctagacgtttgcctgcttagtttttctggtgagccagaatttggttttgttaatatttgctgtttttcttattttctgcttaatttctactttcttccttttaccctcttgctttttcccttcttcctcctatctccccctggccctactcccactttgtctttctgtctcctcctctttctttagtttactctattttaggctgaattgattttgattccttcttctgtcttagaaagtacatataatagagtttgtggagtgatggagagatggccatcaaggggtacaaagtttcagttaggagaaataagttcttgatgtgttgtacctcatggtgactatagttattaataatgtatatttcaaaattgtgaagactaaatttcaaatgtctcaccacaaaaaaagacaagtgagatgatagatatgttaattagcttgtttaatcattccacatttttcccatttatcaaaacatcacattgtactgaataaatacatacaatttttattcatcgattaaaaataatgaaaatacgtatatgactgtaaaatatatctaagagtcactttaactgcatgttacaggttttgagatatagtactctcaacattattaatttctaagtattttgtgattgtcattgtcattttctccttactgtctgatttttttaagattgcatattaaatttctcaaataccttttgagaatattttctattgtcagtttctaatttaactgcccacattatggctagaggatgtggtctgtgtgataaccattgttggaaatttgttgagacttcctttctgatctggtacatggtcggggttttgtaaatgtttaaagtataattaaaaagaattcgtagtccagatttattaaatgtaagattctattaaataatcagataagttaatttcactatttattaatgtttttgcttaaatattttgcctggtttttcagcttctcactatagtaatagattcgtcacattttccttatatcttgtcagtttttgctttatgtatgttgaagctgcactgctaagtataaacaagttcatgattattctatcatcctcatagatttttctatgtatattgttaggtatccatctttagtaattctgatggttttcctttaagattctgttttgtctgctattaatatttcagtattaacatttcttcacctgtttttcttttggttaaaatttgtaaaacatttacttttcaagccctttctgtgcattctctctgataagtggcaaatagctgggtttttttttgttgttgttattatttggttgatttttaattttgtttcatttttggttaaatttttaaagacatttgctttttcagccctttttgtgcatcttctctggtaagtagcaaatagctgggttgtttcttgttgttgtttggttgattttttttttctgcacctattcattggttccatttattgcaaatattaatgtatttggacttatttctactacattatattttttgcttgccattctttttctttttaaattattttatttttgtaattgatacacagtgcttatgcatgtgtctgggatacatgtgatatttattacgtgcatagaatgtgtaatgatcaagtcagggtatccatcacccgagcattgatcatttctacgtgttggcaacatttcaggtctcctagctagccctttattttgtgtcttctttttcctattcctgtcttctgcttaattcatcatacacagtaattctcttcttttagagtttgctcataattctttttactactaaagttatactcaatgcaagtagcagaaaacccaattagagagtcacaaacaaataggagttatttttcttgcacgaaacaaaacctagaggtggacctaccatcagggacccaggtttttctatcttttgctttatcatcccataacttgggggcttttcctcattcttatagctttatggctgcaggctggcagctgcacttcctcacatccatgtactactaggcaggagggaattgggaaaggccaaatggacaaaaaaaaaaggcgtgctcactgaggagttttctttttgtcagaaaagcaaagacttctgggagtagcacccaaggggcttttgttgttggctagaactgtgccaggtagccttctatagctggaaggaagccaggaagaaattaagaatggggcttggggtcatatcatctacagtatctctcatggatttcattctaacatttttcagcaaattctaaagtcattcagtatttctatcctttttccatatgtgacctagacttagcacattttgtttaaacattgaacaactttcacagtgttttcttaatataaaatgaattggttattaatattttttcaatcagaagttaagtgtatgtatctatgtgtgtgtgtttcttttcttttttgtttttaatcagtatctggcgtcactattgtttcaggtatcccatgcattttctcccagtgataaacatttaatagttcttttaatgagggactgtgggagtctgtccctcattgattgattgatacttagtttttcaatgtcagaaattactttgcattgaatcttggatggcagtttattttacatgagtatgaaattttaggtcaacagatattttctgtgaatattttgaaggcactcttccattttctgtagatgagacatctgccattagattttgtgataacttttaaattttacaactttaaaaaaatccctgatactttatgctttcactatagtgtctagatgtggatttatcttttttgctttgtactcaaaggtgttttcatctgaggaatcatttcctcaattttggcagtctctagtataccctcttcaaatatggttttctactattctctttgctttcttttttcggaaactttatttctgccctattacttgtgtttatcattttttcatatcggtttcctatcagcattatctctttctgtattataatttcttactcattttaatgaaatgatgtttttatttctttaaacttcttaaatgtacttgtttagaattcaaatagactgttccagaaattatttttctggttattgactttgttggtcacttttcttaatattagaattcttcatatactttggaattttggtttggaggctcattttgagtaggctgctgcttcttcctttaaaaaaattttttttggtgttaatttttcctctgttgccctttgtatgcaatccttccaccaatcttgctttttctaaaaaatggcctcttctcactgagaaccagctttctcttctctctactccttcaccatggagtctagagccaagtcatagagcatattatcagttccatgactcactttttttcatgttttaaaatctttcagattgggatacatctataattcatggatatatcattttaactggcaatattttttcttagtggtacatagcaatattcttccttaacaattattggcatcctagatttgatgacataggtaatataatttcagatcatctgtcttgcagtgaattagatattgttaatctattagctgagccagtgggcagctctgttcagttcctgaggctgtgtttgtgttttcctgcctccctgtgtttacagcttcctatcatgccagtgccctaggtcaatctgttagcagaagttttcctctggcgagtccttctccatcccacccagtgtggcctcaggggttatctctcccattactctgcagaatggaacttcccactgcccctgccaggtctgtggtatctaccctgcctcctgtgcccctgccagttctgtggtatctaccctgcctcctgcttatttcaggtccatttctgtctcatgaaatggttatctcagttttgaagtgtcttaacactgtaatattttgtggatggttttaaggaaattgatcattgccatagggatgcttcaaaataagcacttaactgtatcatcttgatgggaggttctttggtgcttgtagcaatttcttttttcttttcttttctttttttttttttgtggtgacggagtttacaactggtgattatacctgacactctattgtaattgagtctattgtcccttattctcaagattcagatttttaatatccatattaaaattctttttgaaaatcctctaatttttaaaaatttcctgctttagacaaatttactttgttatcatatcattctaccctgtatagggttagaacaatagcgattcttattggcctcttctaggtaggaaaaataacataaagcatttggacaataaattatcactgaggatgatcacaactaaaatatgtatatttacatatgctttggatgttaaaatatctctactccctactttgtatctttacagcaatcattattatcttaactatatgtgtgaacaaatttttatttattttaaatttagtgatcttattaacttctttaatgacaaaaattatgggtctaatacagattttcaactttaattctttatgttatatatggcttggacttttatagcttactctctttagttaaatgacagacacttgtctatctttgaactttacttacaataagaaatacattttacatgatttgaagaaccccaacatacatacacaatatgcatatgcacacaacatgcacgcacacatgcatttacacaaataattgaaaccaaagtatcacaaaataatatgtagctttgtaacatgtaatataccttgttttattcaattctagacaattcattgcattcagttaaacatattggttgtaaatcagtaagctgatttcaggatccagtaatgggttattgcttgaaaaacagtgtctgttgtatgaatgataattttcatgaaaatcaatgtgcttcatcttcccatttgtattcctggcacaggaaatatttaaatatattagtagtattacctacagacaagacaaattttttgatgtccgtgaaaatgctgaaaggtatgactatacatgagaacaaggtcattatttaccctcctttcacagaggatagcatagtatccatttgattggagataaaagatatttttaaaatgtagtcctttaaaagtcaaaatgataaaagttaaatattctaggtctgttataatctataacctgggtttaactggatctagaagagtaaatctatgtatagctaatcatgataatgactgctgtcaaaaatacaaataaacccaataactgaattcaaggaaatggtacatgtcaaagttggaaaaagaaaagctgtggttaaaacatggttattgtacaattattagatgacttatttaagaaacacctcttttgtcaggagaccagaagattatgtagaaccctgtccctttattagacattgtggtctgagctctgggtttagatagatggggaagactttgaatttatgatgttatgtgtcaaaattcttttttttttttttttttttttgagactgagtctcactctgttgcccaggctggagtgcaatggtgcaatctcagctcactgcaacctctgaattgttcaagcaattctcttgcctcagcctcctgagttgcgattacaggtgcccgccaccacacccggctaattttttgtatttttagtagagacgaggtttcaccatgtttgccaggctagttttggactcctgacctcaagtgacccacccaccttggcctccgaaagtgcttggattacaggcatgagccactgatgtgttaaagttctatgtgtggttctcttcatgtgtggaaaaagatggggccaggcatggtggctcatacctatagttctagcactttgggaggctgaggcaggtggatcctttgagtccaggaaattaagaccagcctgggcaacatagcaaaatcctgtctctgcaaaaaaattaaaaaattaaccatgcgtggtggtgcacacctgtagtcccagctactaggaaagccgaggtgggaggattccttgagcccaggaggtcgaggctgcatgagctatgactgcacctctgcactctagcctggatgacagagcgagaccctgtctcaaaaaataaataaaataagtaaataaaaatatgaacatttgtaagggtctaccattgcatgctttgcccctcatgatgtctcaggtactcatttcaggattctaatttgcaaccagttttgttttatggataatgttcttgttggaaatgcttccaaactcaggctgaatgcagagtgtgttacataagcacagattaaggccatgtctgcagggagataatgcattagaatcctgtagaaccagtgttttcatgtgttcatttggtgtaggcttccttccccactgccatggtgatatttgatgaaactagttggtggcttagttacaggaattacacctgaaaataaatcgcgaaagttcccatatgaagcacaagtttagccatatgtacttacaatgatgatggcaaaaataggtgaaaaacattgtagttatataatattaccatatttagaaatgctagtgatggtggagggagtaataatgacattatataataatgtatgtataatcagtgcagaaaaatttccgctatactccaaaagaaactaatgctttaatttacatttggttcttatttgttctcccctccccccacagtctatcctttcaaaaaaagatgctaatgagtagtaaaggaaccagagctaaaaaaggagctgtcctcatctgtaaattcaccttccccaaagagctgcaagttgactgtttgcagttgccaaaaagctggggcccagcaataaagtgctcagcccccacagcaatctccttccttcagaggcggaactgctcatgataaatacttctgcctccacagaagcctccttgttttacctcctctccgctgttgccaccccacttggttctcgagggcagcaggcagagttgcccaagacttattgtgtggccacaaagagatggcagtcatgccagatggcaggttttccttgcttctacttacccagacaaacagacttaaagcagtctggtggtgaaacaagaattgttgtggccatgaagaaaagttcgtgtcaaaatgtattcatttcctttcattttcttccgagacgcagacaactttttaaaaaaaatctagtattttgttataagacttttaagcaaatgtactacttttatatgcatgttttgaatgcctatgtaaaaatgtaatgggcacattgcttacagtactctgatgagagcacaccgtttgtctttaaataaacctagatgtgatctttggtttgcatttagtttcaataagccaattattggcagatttttcactgggtggggccgaaacggcggcttattcattttttcttaagcatagatactcaagggggttaagtaactgcacaccactggcaaagatttgtaatcctcagtgctagtaaaggtgaggcacttacccctttaagtgaggagagatggcttccatttaattattgctctgtggcatttctgtgtaggaagtgggaggcactgcagatgctcggaggagttgggaggcccatgtgtttctgcactacctggtctctgtgccctcgcctcccttcagcctgccctctacatagcagcagaggatcctgtgaaacaccagtcagatcccatcactcctcggctccaatgctggggtattgatccaggccatcttatgtagaggcaaagcccatgccctcaggccttccgatctgactcttctctgtgcatgtgcatgcacactcacatgtccccgctcacaaacccactcactttcaacctcacaggacttcttcgaagatgccagcctccttttcacagcctttgtgtttactactcctgctgcctacaatgctcttcccccagatatttgcagcgtgtactccctctctttgggcatcattttctctttgaggctttccttgaccaccccatttactctgttaactgccccctccccaaaattttctgtcttgttctctgccttattctttttcatcatactcaagtcatcatctaatgggctaaatagtttcctttttttttttctttttggtctgtctctattctaatgcaagcttcatgaagacagggatttttacctggtttattcactgctatcctccatgcctaaaataatgtctggcacataataggtgctcagtaaatatttagagaatttgccagtagtatgttctagtagcccttcacaatgggcatctggctctttagacctgatggctcatgttatctttcttgctatttgaccttgatattggtgactgtgagtctggttcctcctctagttgtagtgccttgtgctgccttagacacacctccagcattgatacaactgttggccacctcactatggcctaccctgccatctgtcctcccacattcccttatatcagcagggttcactctgggtatgaatgggactcttctgtatgccaaggttaaggtaggacccaagggtgtatatgatgcagtccttctgagtcttcaggcctgctgtccgccagaggtctacagggttaaactagccactgagtctccctaacagctggcgggtgactgactggcagagtttagtataggtggcctagaggtgtggctgggttggatggaccattgaagcaacctagaaagtgtgagccagacattgccaggcacccttaagaagtagccaaatgtgctgttttctgtggacctgctctttggaccagcctgctgccaccttgccatgggaggatttgatgtgtgtgccctatgcttttgcaagcagctttgctttcctctgaaaggcatcatctctgttcacaaatgacatgacttcgtttcttagctcaaggcaaaatttgctctttgagtttgtttcctagggctgttgtaacaaacaaccacaaactgggtggctttaaacaatagatatttattgtctcatgggtctggatgccagaagtctgatatcaaggtgttggcagggccatgctttctctctgagggctctaggggagatccttccttgcctcttctagttttggtgtttgttggcaaccctaggccttcttgggtttgtaaatgcattgcaatctttgcctctgtcattacacagctcttctctctgtgtctctgtcttcttctcttagaagaacaacagtcatattggattaaagatctaccctaatgagctcatcttaacctgattacaactgcaaagactatttccaaataaagtcacattcacaggtattgggagttaggacttatcctaatatcttttggatcttatgatatccagttcagcccacaattaaacccacaatgctcttcgtgagaaagaagcagcagccatgaagaaagcctagatatttttaagggtggagagcgctcttgacctttcctttgacagccttgagcttccctaaatactgttgtcctcactgactggcttgtcttaggagtagggtttttgatcttcaaaccttggagtgcagttcagtaaagtgagacaagcataccttctgtctctgaggtccaggagcactggaagagtggacagattaattgtgaatagagaatgccctgaaaatacaggaagaaccaccctcctgcagatgtagctctggtcccttgtgggagcccctggaccttcggtgaggcagatctggaaggctacagcaggggatgtaaagagccccttcctagacccgcttcctggcccattattctgcccttccaaatgtattccaagggctcctcattttgatcattgctcagtggcattgttgtagaggaagtaggagggtgcttggtggagtttgggaggcccatgaatttctgcacttggagaaatgttaatgttgagcttatatttctctccttgcagcacagaagaccattactaggtctgtgtgtagaagcccaagcagttagagggggcctctgcgaggcttgtgggatttttctggccagaagatgggccatggtggaggaaggccatgttaaatggctgtgatccactgcctatagggaagagtacgcaacacacacccaggagggcttaggtagccggaactgtggcggctccatacccccaaagtgaattttaaacttgacttatttatgccgttctcatagcaacaggaaaactgttccgacctatagccacggaagactctgtaaaagaaactgtaggaggaaaaaaagataatgccaggaaaaaaaaaaatttaatgaagtaccattctttcacttattcagtcaactgagaataacagtttgtgcatttggcaatcaaatgggaagtggcatttcgtgttgcaacatgaacctgctcacattaagtgatttatttttttgtttagacacactgtactgagaactttcttcaagtagaaagctattaaaaatgtgagaacaagcagtcctcactaacctgaagcatttggggacttagaggaatgataaatgcaaacagcccagaatccagaaactgtcttgaacatttaaactctagactctgggaatgtgtgcatgtcttcagttagtcagatgtagataatttttctttctgtgaggtctcttttcacttatatcttgtctggacagggtggagcccctgcttaaattctatttctagcttgaagaaagactaaattattgtagaccaaagccagtgctactcggaaaatggaaaagacataggagacagggcatgtcttctttagcccgactgtgaacttagggcccctcctctggtgagtgctcctgggaggttgcacaaggcttatgttcagctactgggccaagctgaaggaacgcctctcatctctctcatgtttgtactgaagatccgtgtttggtaaccatttcatagatcttttctaccacttgatcctgggcttgtagttaatgctgtgctcagcatatttctgtgtgatcttgataagaaatctattggccaaagaccttgtgagctatttctgtcctctgtctctctcatcttctatttaatatgtttgtctgtattatatacgtataaatataaccgagttgtattacattaattcttttttttttcaaaaatatattaaaattattccccttttctaacctgcccatttatgagctcttgcacggtaacatcttgattcccattttggctgagaaactacataaactagtttattgcatgctgctccattttgtattcatggttatgatattgaaacttcaggaccacacacagatagcatagtctctggccacttaagcatgtaaacagtctggctttttataaagtggaaaaatatttcttgtgcactattttaacatgatcagcatgttgaaacttggtgtgcaactgtgtcaacatttctttggctctgaggagcaaacccggagaacctcatggtaacatataaaatgcaaagctggtttgtttactactgggatttaggcagcaattagagtctgtagttgacttccaaacttggggtacagaataagtgaaataattatttttgcatcgcgattatgctagctaaaataatgattccttttcagatggctaagattctttcagggaagcaaaggaaaatgggtggctggattacaatgcagtttctttattgaaaaacccacattggacccagcttgacagtgttttcttttgtttcataaatttactgaacacctcaaatgtgtcaaatccttttctacatgctaggcatgtgaatttaacaagacagacaggccttatgttgtttgctcaaactctctggctctcttgaagagaaacaaacactaaataagtaatcaggtaaacaagaagatgtttatgattgctatgaaattcaacatgagatgtttaccaagggcactgttgagacccttaggatgtgtcagtgaacaaaacaaatgcacattttcttctcttaggggtctcacattctagtacaggaaacagaccataaacaataactggaataaagacataaattgtagagcatgttcataagcagtcagtactatccaacaggaaaaagcagaaccaggtgaaaggtatcaggaggagtgaggcagcagggggtgtgggaacggacaggctgcaattttatttttatttgtttattttcccgactttattgggatatgattgacaaataaaaattgcatatatttaaggtgtacaatgtgatgatttgatgaacttacacattgtgaaatgattactgcaatctggctaattaacaccttcatcacctcacattttgtgtgtggtggggcggtgagaacacttaaattctactctctgggcaaatctcaagtgaagctgcaattttaaatcaggtggctggggaaggcctgcttgagaagacttgaagagatgagggagttagctcagatgtgtctcagggacagtgttctaagcctatgggaggccagtgcctttgacaagcaaggaggcaagtgccttttaatgaggatatgcgatttgaactaaaacccggaagatgtgaagaacccgtcatgtgtagagttaggtgggagtgccccaggcagaggaacagcagggccaaagaccaagacaggagaggaagaggccactatgactgcccctttaaagtggggagatgaggtgggaaaggtgggaagagattgctcaggtaaggttgtatagtccacggcaggggtttgggttttactttgtgtgaaatgagttgtggaagaggagacaccctcttctgattgcccatctcataagagttcagagaggagaggaagaatgaacccagcataaacttaccctgaggaccaaaaacctcatgagggttgggatttgatctgctggtttaccactgcatcctagcagtgcaacaaatactaggcccaggaaagcagtcagtatttgcagggatagacacatggatgcatgatttagtgacatacctcctgggacagaagcctattatcttttattttttgagatatttggaaaatgcaaagaaaaaagaagtctcaagaataatataacagcactttatgccaaccacccagaatttacagcagttaacattttggcatgtttgcttccagccttttttattatttctctgtgaatacttaaaaggcatacaaggagcagagggatacagtctcctttatatatatatatatacatatatgtatatttgagatatatatacacatatgtgtatatttgatatatatatacacacatttgtgtgtgtacgtaaacattaaacttctaattaccattcttagttgctttccccatgctagaggcgatcatgcctaataatttattagcagatcctgtttctggtttgcatctgggggaaggggaggtagagaagagagccagccttatatgagaggacacttggcaggttgtggcccagtgctcacctggccggagtcagccagtgtgtgtgcccacagccctgcccttggagcatcagcctacttggcgagcacctagtttgggcttaacacagtgctaggcacaatgccaatgcgggcagagcctaagagagcccagccctgaaaatccttctctttatagcattcctgtagcatgatttgtcctgggtcagtttgtccttgcccctgtgatatcttcagcaaatgagctgctcaacaggggtgacccttccagataactgaggcttattcctttattatatgaaacgcttttgatagaaatgatcctgaagtatctcacagatttacatttccctgtcttcttaaatgaggtctattagcctttgatgtgggttgatcaggattgttcttttcaacaacagttgctatatccattcatgctcccgggggctgctggcaacttgctcctacagtacatggcccagactgctttgcagagtatgttgctttagaaactcttctgcctgcttttgctaactttactggttctccttctccgtgggctggcagctatcccttcttgctgttgtcagtgagcctgcttctaactctgcttcagttgcatttctcactctttatttatgagttccatccgctggggcctgggaaaggagatagtcaaattaagtaaattctgggtacagccaaagacgactcccagtgagtggctctccactgagggttccctgcagaccctggggcctaacttggggtgtctgttagacatcccagcctgacattttgatactggctggcagacacatttggatttatggccttcccaagagaatcatgctgaggtcagtgctgctatgtgaggctctgtaagcattccttagtagctctgtgatgggttaatctccctcctcccactccgagtcagggtgtcactccctttcccctgtgattctacccacaacgtctgacctagtgccaggggcacggagtctcttttaactgccatggtagttggcatcaggttgtaattcagcattagggtactctgactgtgaaattgttgttcccgggtctttcaattatttctgttattcaattataaagatagtggggaacatggagataatctcattccagcttatagttttgcagttgaagaaactaaagccctgaatggaaaatgactgagatcaccgagttgatagtcaccagcagagcaccgtccccactgtggaacagtgaccaccatgggtgaaattgctctgattttgggctgtaatttatctgaaccagtaagttggacagccttggcaacactataaagtagagggtcgctctcctgtacctcatttcccaagtgtggtaggatatcgccttgatacagaccagattctcttcctgttaaagaaaagtagtttgcagctgattcactatgtggacgaagatccatccagaaagatgttcattgcagcattgtttacagtggtgaaaaaatggggacagttggtcccgcattgggatgatgaatacattttttttttttttttaagccacagagtctcactttcttgcccaggctggaatgcagtggtgcgatcatagctcactacaaagccctggctcaagcagtcctccccttcggctttcccagtatctgggactacaggtgtgtaccaccatgcctaactattttttaattttaaaaatttctttagaggcagggccttgctttgctgcccaggctggcctcaaacttctgcctcggcctcccaaattgctgggattacaggtgtgagccactgcaccagcctgatgaataaattttgacacagcaatataatagaatattatgcagctattaacattctgtgtacagaattttaaataacaaggtcattgaaaaagtcactggtcatttttgagcctaatgttataatattaagtcaaacaggcagaattaaaaggaagaataacaatataattttaaatttttaaaatttcctttttaaaagaagaaaatggtcaaagcatttactagtcactcttcttgattggtgaagggaaagaggctgtgtgccgtccatgcactggatactacatctgtcatgtctgtgacactgccatgtggtttttacccttgatttgtattcagactgaacaaatgatccccaagcccttagggtgctaaagagtgcatgagccatactccttgtggccacacacacctttcatcctggataatgggcagctggggccacaggcccattgtgcagtcaagtatcttgcttcctgctagtatcagcggggagcacggagccctgctggtggagcctgtccagctctactaaagatagagcaagctgcagtgaaagagagcctggccatggccttaggtgccttgcaaattattgttgttattattattattattattatttttattattttttttttttttgagatgcagtctcgctctgtcaccagactggactgcagtggcgcaatctcggctcactgcaacctccacctcccgggttcaagtgattgtcccgcctcagcctcccaagtagctgggactacaggcgcccaccaccatgcatgtctaactttttgtatttttagtagagacagggtttcaccatgttcgccaggatggtctcgatctctcgacctcatgatccacctaccttggcctcccaaagtgctgggattacaggcgtgagccatcgcacccggcggtgcctggcaaattattaatgggcccagggtgaatggacgcagcatgaattgggcacactgtacctttgaaggaccctgccagccaaaaccactgggcctgttgttggagacagggccgcttcccgggtgactttatcagagaacctggctttggtgccgtgttcttgtccctccatttacctttttggcaaaatggaaccaagttgtgtccttattctgttctgagttgatggtggtcctttaaaacttaaaaagtttgcaatatgttgttctcataatctgctgacacctatttactctctggtgtatcctacatatttccccgttcttaagatggggctgatggtgtgcgttcccaaagctttcttcatcatagtctcagataaaaacacatggcactggcagtcttagtcagatcctcactctcctgcaatcccttctgaatcctccatgccatggggctcacactgccctagggatactgtcagggatgttgaactccatgagactgtctgttcacctgactcccaggcagacagtaaggcgatcaggcttttccttaagttgagctgaaagctgaaatctgcctccttgaaacctacctccagctgttttaattttgccagcagagtatgtccagctcttcaccagtaacagcaagcacaaatgactaatttaagaaaagcagtacagcagctggacgtgttccatcttctttgatgctcaccacctccctgtgaggaaagtactcttactaccccagcttcgcagatgacacttggaaaacgtaaggacccacagttaggtggccagactgagagcagagtgctgagtcaccacacggtgctgactcaccctcttcacgtgacagcccttcctgtgtgtggagaccacagtggttttcttcttctctagtaaatagttgagttcctttgaccattccatgtgtaataatgttcattaagtatgaaactaaaatttattgaaatttaacatgaaattgttgcatagtaaaaactcatgcctatcataagagaagtaatttggtatttttttcttgtcagataatagcatacaaatgtgagattatgggattggaaagcaatgtctctgagttacttgagtctagaacaggggttggcaaaatttttctgtaaatagccaaataatacatcctttagactttgtgagtgatagagtttctgttgcattaactcatctctgccattattgcacaaaagcagacataggcaatatgtaaacaagtgagcatggctgtgttctagtaaaatgttatttgcaaaaacaggcaacagctgggttttgaccttggcttataattttcacttaatggggtttttcttgataatgagaaagaatttacaagtgggtgctaagtaggagaatcctagatgttttgttataattattaatagcacccctttttagtttcaaaaatgtcttggtcaataaattaacgtattgtcatcctggtattatgtcactttaagtatttttttttaaagagatgggttttgctctgtcaaccaggctggagttcagtggtacaatcatacctcttctgggctcaaatgatctcctgcctcagccttccaagtagctaggactacagctgtgccccaccatccctgtctaattttatatatatataggtgtgtgtatatatacattatatatatataaaatatatatagtattatatattatatatagtatatatagtattttttatatatagtatatatattgtgtatatatattttatatatagtatatatagtgtatatatattttatatatagtatatgtattgtgtatatatattttatgtatatatatacacacacacactctatatatatatatatatatatatatatatatatatatatatatagttgttgttgttattgcctaggctggtcttgaactcctggcttcaagcacttctccctcctgccttagcttcccaaagtggtagaatttcaggtgtgagtcaccacacccagccactttaaatttcttaatgagactaaggtgaaatagaaactttggtttatgtccttaccatggtcagtcattttttgttacaacagaacttttctgcatcaggtgacttttccatagatttctatcctgtcctagtccaggaagaggtcctggcagtgaaggaaaactcaaggagggaaaacgaagacctcctagaggagcatccctagcttactttttgggagtagtgcctgtgtgctggacactgtaccaaaggctttatatatggcctatcttaggaaacagctgctaaccccaggagttaagtatgattattatttcagttttactgacgaggaaactgaagcacagaagcttaggaaatttgcctagggtcacagagctggaaatttggtttggattcaggcctacactgtctggctccagaacccaagctgggagattgaacaggtgtgaaataattaaatctaataaatcagtcaaatcaaagcaggagaagattgggatgaggttaagaggtggaagacatacctctcatcctatccatcttaggtacaaacatcatggaagtcgggggtattagctgcaccttttcattacaaaatccttaggcctgctggttaagagaaatctcagggcactggagagacttgagggcagaagatgccaggtgggcaagggcatccttggatttaggaagagtaggaggctgccttttgcattagagctgcctctggcattcccagggttttgtctggctgggcccaagggctagaaggactggaggagtcctagctgtgcctatcactggccattgcccctctgcagcagagtagtcagtatgcagcacagcatctgcctggcacttaagatgtgcatctctgtgggacacctgtggcttctagcgaggacagtggagggagagtggcccacactagtctctggactcttatactttaggccccctacttctagctcagtgatttaaggagaacaccaagttgtacataattttcaaagggaggggagttgccttctttagataaacctatgccaaaaggaaatctttaaaaataattcccatcagctcttattatttctgggtggtatttttttgtacattttccaaagcagtgaccctaaccacaatgaggacagtcatttggagcttttgcaagctactcattcaaagaaaagtgcaaagaagggtgcctctaggtttggttacaaaactctaccggggagtgggaggtgagagtgggaaaccggtgaatatgcctcctggccccaactttttaaaatgtatcctttgaggtgtattctatttggtgcattttcccagattttgaatgttgccccaggacaactgtcttaagttcgttttggcatcaggacaaatgagaggatgtttcctgtttgcctgactcttgccccaacttctttctctgttctgttaagctcttggctaaattctttcctcttgtattccacattttaactgacattagggcaccaagtgcaaaaatctgcaaacagttagctttcctgtttgagcattctggtcagattatgctgaagttaaagttcttgtagcacggaaggatcaccctctgtacaatgcattaagtatttaataactgtactaataattacaaacacttttaatgggccacttgggagccttaatgtggttaaaaaatgtatttcttctctgtcaagttaacttgtgtcaaattgagagaaattcttctaagcagctttgaaaggtttgagcttcataagcctaggagcaagtagcatattgtgaaagtagtttttatgtaagaagagacaacagaaatagggtgagtattaatgtagtgctttgtacatttcctttatagttttgtattttttaggtggagaagtgtcccaccaccctgttgcatccgctgtatgtcaggttaagcaatttttagtaggattggcagcaaaaccaactttggaacacaggactctctggcttcaagatctcttctttgggaatgtggacaatttggatttggccatttttgaagtattttagaaaataggacactcttgaggggcagaattgaaggtcgatgcgtcttttgttaaattcacatttatttgtaagttgaagcttttttttttttttttttttttgagacggagtcttactcttgtcacccaggcttgaatgcagtggtgcaatctcgactcactgcagcctccacctcttgagttcaacctgttctcctgcctcagcctcccaagtcgctgggattacaggcagctgccaccatgcccagctaatttttatatttttagtagcgacggggtttcaccatgttggccaggctgttctcgaactcctgatctcagatgatctgccaacttcagcctcccaaagtgctgggattacaggcatgagccaccgtgccagacctagctgaagcatgtttttgagaaattattttctggtgaaacaggtgtgcctttgaagtgatatagttgctttccaaagctcagaaagaaagtattaaaacaaggataaagtcctataatgtaattaccagttttactttgttttggcttatttaaaagtgttggctccttactccaaatgagatccagtcaaaacacttacaattatagtgtgcatacattaaggacttaagaaactgttatttctcaggtatttggaaggaaatgatgtcttctggatgaaattcatggcataagcatagctcatttagttcactagcctgaatattctatctgaatggtaacttttttaaatttaaaaactttgcttttaggtgtatttgtatggttggtatcagatgattatttctttctgaaagctgatattttaagagagataaagtctttacacctgattttgctgtgtgagaacagctctctcacatgttacttgaggtttttttgttgttgtggttgttgttttgagacttggtcttgctctgttacctgggttggagtacactggcgtgatcatagctcactgtagcctctgcctccagggctcaagtgatcctcccacctcagcctctcgagaagctgagaatacaggcatgtgctaccacacctggctaatttttgtgtttttgtagagacggggtttcaccatgctgtctggactggtttctaatttctgagctcaagggagctgcctacctcggcctcccaaaatgctgggactacaggtgtgagcctccatgcctggcctcgtgaggctatttttatctgcaccttagtatctgggatagtggtgccttcctaggcatgggtaggtacacacatacacaaaatgtcaatgctagcaagtttttattctttgaggaaaggtttagtttttttagctcagagaaagtaagtttagtttttcaactcagagaaaatcaccttattaatcttcaacagattaatgttgattaatgttattgagcaaagctgaggtatgattctaaggtaatgaggtttgtcttctactgaggcttataaactgaatcttaggctgttacagaaaagaaattgctgtgggttggcagcactgaggaatgagcattctgccttctaagacgtatgcttgtttgtaagtgtctgttctgagatgttttgtaacaaatcagattcattgctttatagcccttcttcattaagatgggtctaacacggaaaacctcagaagctcaccccatcaaagacagctgtgatagaaatatcaagtaataataagtttgctgctgtgatttttttcagaaggaatttgctggcatcagcaaagaaaatttcaaagtgggttaggttgtctccattggcttttattcatctttccctttcacagaatgaaaaaatgtctgggctgttatagctttgttctaaagtggcccataattttgtctatgttttacatcccagtggattcctaagtccaaatatggtattgcttctcagagaggtctccttttctttcccttcaatctatacaatatttagtagatttattttgagatcaagattatcttttaggtcaacctgcaacttaaaacctgctggactaatgtatttgaatgagcatgggaggaactatgtatgaacattctgatcattttacattgtcaagcccttgcatataagaaagcattcctaagaatttaagaaattgttctaaactgatcatttctctgaaccccatctcttactggttctttgtttccataggtaccataccagaaagactgtcatcaaaccctcacagggtcaatgtcaatatcacacttgttttataacactgtcagaaaccaggggtactgctctgcccctcagtctggcttgacaaggtgaaaattcagggacagatgagaggagggaccagattgaagacaaagaatggacataggccagaacgtgatgtagggtggggataaacagagtgttctaacagaagtgatgtgtcagaatcttcccacttattagaaacgaaaaatgtcaacatttattaaaagaaatgaaaatctgaagcattggttttagggagacggacatatgttatgagttagaaggtcaggctctggagacaaatgagcagcccaagttgcactcctagctccttgtccgtaggccgcttgctaacatctcagtagctacatttctcatcagtaaattggaacaggggctaattgtcctgctgcatagggttgatgtgaggaataagtgaggagagcatcttgggtatttaggaagccctccatctgtgctgatgatggggccaccctccctggaggtgtggagaagcgacctgggctggtgctcagcagctttgtcagcttatcatccctgcattccccagcaagtcttctaacttctctaggccttcattagtttcagcctttgtcaaataagggatttgctatatacaagttccttccagaaggaaaattttatgtttttaaggtgaaattttatttctcccaaaaagcaaaccgagaataaatagtagtttacaaattaagagttctgtttataatacacactggggcctactgggagtggggaggggcagggggagggagagcctcaggtagaatagctaatggaggctgggcctaacacctaggtgttgggttgatctatgcagcaaaccaccgtggcacacgcttacctacgtaacaaacctgcacatcctgcacatgtaccccagaacttaaaagttgaaggaaaaaaagagttctgtttagaaaagttaatgttctgttaggaagatatacttgctaactttaagaacacattgattaaacggacattgttgctttcctgctggaaactgagtcttgacgctctggatgaccattctccacccagcactagagaccagtcttttctttctttctctctttctttctttctctctctctttctttccttcttcctttctttctttctttccttccttccttccttccctccctccctccttcttccttccttccttccttccttcctttcctttcttttcctttcctttccttttccttccttccttccttccttccttccttccttccttccttccttccttccttccttcctttccttctttctttcttttctttctttctttttttctttttttagacagggtctcactctatcacccaggctgctgcagcgctgcgatctcagctcactgcgacctccagggctcaagtgatcctgccacctcagcctcctgtgtagctgggaccatgggtgggagtcaccacatctggctaatatttttgtattttttgtagagacggggtttggctatgtaactcaggctagtctcgaactcctgagttcaagtgatacacccactttggcctcccaaagtgctgggattacaggtgtgagctaccattcctgacctaggggcttttctaaggaaggcagaaaatgtttgcctaacacaggtgagtaatgctggccacagaaaggtagtcatgagtttgatattctttcctgcctggtgttctgaaagtaacattgttataaattaattgtaaaattattgcattggagatgctttatgaaaaatgtgctttattgaggtgtgatttacatataataaaatacacccatgtaaatgtacagttgaatgtttttcttttcactgtcatagtctttgcaaaagttggatacgttttgacaaatatttacatctgtgtaatcattgccttatcgacttttaaaaacagctttatggaggcataattcatataccataagattcctccatgttaagtatataattcagtagtttttagtatcttcacagagttgtgcagccattactgtgatctaattttataccatttcatcacccccccaaaaagaaaccccatactcgtcagcagtcattctcctcatctctgtgcccactcctaccccttggcaactgtttatttactttttgtctttataaaaaattgcttgttatggacatatcatataaatggagttatacaacacgtggtgttttgtgactggcttctttcacttagcaaaatgttttcaaggttcaaccatgttgtagtatgtgtcagtactttatttctttctatgattgaataatattccattgtgtggatacatcaccttttgcttatccatttatcagttgagggacatttggattgtttctacttttggactgttatgactaatgttgctatgcatgtttgtgtaaaagtttttgtatattcttacatgctttcatttatcttgggtatatacctggaagtggaattgctaagtcgtatggtgactctgtgtttaactttttggggaactgccaaactgttttcaaagtgactataccattttacattcctaccagccacgtatgatggttccacatcctggccaacacttgctatcgtctgtcttcttgtttacagctatcctagtggtatgaagttgtgtctcagttgtggttttaatttgcatttccttgatggctaatgatattgagcatcttttcatgtgcttattgactatttattttctagagaaatgtctattgaaatcttgtgcccatttttcttttttcttttcttttttttatttttgagatagagtctcaccgttggccaggctggagtgcagtggtgcatctcagctcactgctacctccgcctcttgggttcaagcgattctcctgcctcagcctcctgagtagctgggactacaggcgcccgccaccatgcccggctaattttttgtatttttagtagagatggggtttcaccgtgttagccaggatggtcttgatctcctgacctcgtgatccgcccgcctcagcctcccaaagtactgggatttcaggcgtgagccactgcgcccggcccttgtgcccatttttcaattgggttatttatctttttattgttgaattgtaagtgttcattatatattctgatcaggtatatgatttgaaagcattttctcccattctgtgaattgtctctttactttcttgctggtgtgctttgaagcacaagtgtttttaatttgataagcccaatttatctagtttttttctttttgtcacttgtttttgtatcatatctaggaaatcattgccttaccaagattatgaaagttcacacttatgttttcttctaagagttttagagttttcattcttaaatttaggtctgtgattcattttgagttaatttctgtgtatggtttgaagaatgagcccagctttaattcttttgcatgtggttattcagttgtcccaacaccatctgtatgaacatatgttttcttttctttccccttaaaattctttctccctttaattgttggaatcacattatagactttgaaacaaaaataatagttccctcttccactcctctctatcctctgttcccactccccagaagtgagcactctatagactcttttggctgtttcttctggttttcaccttcatacttataaatagcatccttatatggcagttctggaggattatttaaaacagtatatttaattttgacacatttttatagaaattcctattgtgttttcattattatgatgatatattattatgacagtatttactgcagagccaggcagtgtactctgattacctttcgtttctctttaattcccacacctcttttgttttcatttgcttgctctcttcagcagccttgctgatctgtcttactctcccgcagctcttaaaagtgcctgccagtccacttctctccatggcagatcatctttctcttctgtcttttctcattgtgtgtctgtgtttttgttctgtgagtcatccttcctggactcctctctcttgttccattcattctaggctggtcgctctccatgactgctgtcttcctgaggcttcatattgctcttcttttaggagctcccatcacctctcttctctctacgtgggttcctgtgcctcctagcttagtgtggatttttctgtaggagatcctttacatacagtcaaggaacctgatgcccaggctagtgaggtcccttagctaatatccttgagctaattagtattttcttttcctgctcaaggctactgaaaatgaattaaattcaattaaaatgctgagtcaaaagcagctgtcttactctgagtggcaatattattcatgaggactaaaatgctaggaaccaagtcaccaggaaaccaagaaggccagaagtggtgctacatccccaaatatgcccatggaggccccagctccttcctcaccacatctctcttccttcagaggctgcttctcttttacatacaattctaaagtgcttggctttttggctttctaaggcacaacggataatctgaaagtgtttaaatttaggagcagagggagtgcagagatgggcacactgtgagccataagaagtgccagttagctaaggggacaggtggggaaatgacttttaaaaaatcaatccataattagtagagatctgaagtatgtgtcatttaatttgattacagaaggccctacattagtcagcatcacatagagacatcactttattatggcactctaaagtgactggcctctcttcctcactccctttcaccccccttcaagagatttgaagagatttgcatgtgttgtgacatgcaagcattagagataattattagtaagatataactggaaaatgtctgttttgatcttctgctctcaatagaaaatgcacgttgtgttgcagttaatgcaatgacattattagttttctcttaatgttgccttttttggggggatcttagctctttttgtaaagacttattaaagccctcctaacactctcagtgacagaaatcagtgttttcaatcctcttcccctctgcctttttaaagctatgcaacgttttcttaaagtacaatgatacgcggaaaaagtatacaaacccgtagggtggaggtgctctgttggtgagagctggctgaccctttttccttcctgccaagcagcccagcagggagcaaagagaagcatttaggagggaaggagacacatggctcccggtctcctgggcctgcgggtaccagtgacagtgcatgcaactaaaacctggattttgttgacctgttgcattcttagccaagtgccttaccctcattaaaatgcccttccgtcactcagtcctggggagggaggtcatctcatgcgcttacatatcagcccagctggctgctactggtcctgtttctcacagagaaccctccttgttcttccccgccattgaatctgttcatccatcgatgccacaagagcccagctgcagaaaccatagagaccatctctcctaccccatggcacagcctgttgctgaggaagggggtcccaccacagggttgcttgggccttctgtgaataagaatttggtaggacagaaagcatatcacatccacctcactgggtgcacaaccctcttccctactgtgttaagttctctctaagccctgatcatcctgcagtttctccttgccatttagcctctaagtctcccggcccactattcttccctgcctttgcttgacctgcctgcatgcatatgtgaatcctaagtgcaaacagagatcaaattgttcctctgtagcagacctcttggcatgggatgggccagtgggtaagtttatagagcaggtggggactatctctctggccagaaggatctcaagctggtttccacctgaaagggatgctataccacgagatactgtgacagtcagagagacaggcttatagctttctcctcctggtggaagtttatatgaaatttgtttctaatgataaaaggacacataagccagtttgcaggggggaggaggagttgaattcatccaaatcacacttaactggttttcatgataattattaaattgcctaaattgtcttccttctttcaattgacctctgtatatagacatagtcaaacgcctttgtgtttatttcttcatatctacagacatatgattatatggaagaagattaattataagataaagtaacagatccttcacctttgtaaatgttgcattaaacactaatgactttctaaaatgagactgtaagcaccatagaagacagggaccaggactgcttattcacaccatcctccacggggcctggcacggtgcccggcaccaaacacccagtgctgatttaatgaatgaatgaataatttattgcaggagatgatacgtcagaactgtctgctggaggaggtattaggtgagaagctcatattaagctttaaaattatgagcagactaaaaaatctttttttaagagttgtctcactatataaacaaaaagtcacattatcacttagctgcaaccaaattcttatttgagtctattaaattcatttttttaaggatgtgagacagtaggtgaagtatcatttttaaaaaatgaattggtaggaggaggcagtgatgtttggccattttgttgttgttcctgtctgacagggacctgcaagggcagggctggctggtcgaacgtaagagccttcctggctggctgggggaccagcgggctcatgaccctaagactctgcactgggaggcgtagagaatgtggaaaggcctggtgacggcagcaggcctgggccagccccagtgctttgtgatggaagagagctgcaggcctcatggggtttgtaaagtggactggctgtgtccgtttgggattgattacacagttacagggatggctcgcaaaactccaggaaaggaggacccttggcagcgttcctctcagctgctgctctttgggaatcagctggactcttctcaggctctgtttttgttccacagtgcccaggtttacacataacaggcatagccatgcagggagacactcttgaccacccgccctgccttagttccacgttgccgagaaacatgaaatgattgttccgtcagctatggccaggcctgggatgaagtcagaaacacacagggctcccaggagcccactcagcagtgatgagaaaatagtcataaagaagaggtttaattggaaattcagtttgctatattcgtaaaaatgtctttgatgtttaaaataattaatatttttgtgagttgctttcaagtttttatttgacctgtggggatacaggatggtagtggagctacaaaagtattagctgagtgttgtatgtacagaagtcagcacagtgtcaagaaggaggactgggctctgccagttacctgccatttgatcttatcttttcaaagcctcagttgacaggtctcgaaaatgaggtaatgattcatgcttgctcacatctgaagctcagtacatccagaattctgatctcctgctcagtcatacttgcttgttcctcggacatttctcctcgtcatttctactgccattgtcttggttcaggttgtcatctcctgttgctaaggttacgtaacagccacttaactagtatcattgtcttcagcttctcccctctgcacctatcctcccctttggagccagtggtcctgtatgtgcttatcctgtttgatagagaaaaaagttcctagcacattattaaaaatagaaagatagaaataaaataaaatctttacaatctgatccagcttatctttttcttttattttaaatgtggtttctttataattagtattttcatcatttttatgtgtatatcatttaaaacatgaaatagcagtaccacaaggattttaagaaaaagtagcagacccctgccttcagttcttcctatttccaaatcctgtactccagaagacacctctttttacctgtttatacagtaatttgatttgccaattttgatgttatatattgacctttctctacacggaaatttagcactcatacctcttgctttccatctgctcacatagaagcttcccctctttcccttccatagttgtattacaatgttgagttaaatctgtatttaatgtttatattattataattatataagtatttttaccgcttagccgaactatataccatgaatacattttctcattgttataatggtttgtttttcctggaatttagagttgcctcttttttggcggattagggggtgttaatggttttctttgtttctatcactattttcctccagaattattcaaatgaattataaagtccttccaagaaatattttcccacaatcaaacccatcaggtaatggaccagcacatttcttcgtgtcttcctggagatgtcattctgttgctttctggaccaactgcattcaaggctcagcgcacagacgtcattttctgtttaccttcacctctcttctgtgttagattctccttttctcacaccttccactgtcttgacttattcctttttcggtggaacacaattctagtaactttctgagaaggaatgtggatatggggtaaggacttgggggtctcctgataaatgccttgctgccggcattcttggagctgagcagcagaagggccccacttctccatggagtcctctccctgctcatcactggcctgtcagctgatctctttgttctagcctgcatttccggtctcaccttcccccatcataccctccttccttcatgcgcacatcacattgcactttcacgcctctgcatttgttcacactcttcccatagacttcagggttcttccccaatattctacttggtaaaagcctagtcatcaatctagatgtctattgaggtgataaaattatagttgagaaagagaatggttcccactctggaaatcatgctctttctcaattataatttagctcttgctcaactttggtttatcaaagcatgaaaagtcagtttttaggcaggtgtatgagaatcattgggtttgggtttgtcagctgtcatgatcctttttgggatgagctagaatataattcattaacaagtaaaatttagtagtgtttctgacacgtgctggtatttgtctgaaatatgtcctcaagattgccactcaggtgttttctccatcaaattgtttttgaactgctgtgtttttagtaggcttctgtatttgtttcctatggatgacataacaaattgccacaaaccaagtggtttaaaacaacagaaatctattctctcccctctctctctctctttaagagacagggtctcaggctgggcacggtggctcatgcctgtaatcccagcactttgggaggctgaggtgggtggatcacttgaactcaggaatttgagaccagcctgggcaatatggtaaaatcttgtctctaccaaaaatacaaaaaattagctgggttttgtggcatgtgtctgtggtcccatctacttgggaggctgagatgggaggactgcttgaggctgggaggcagaggttgcagtgagccaagatcgcaccactgcattccagcctgagtgacagagaccccatcccaaaaaagagagagacaggatctccttctgttacccagatgggaatgcattggctattcacaggtgcaaccaaagcaaggtacccattgagatatgtgttgtatgttgataatcaaaagatatatcatcttctggctgtaatgatcacataccatcagtattttgctggttcatttgttcacttaacagataaacatgccataaactaggccctatgctaggcgctggctctataaaagctataaaaacaaaatactgcccctcaaagagctcacagttctgccagaaaagccagctcgcccatgagggtcctaacttattatttaaatacatccttgaatagccatagaaataaggagttaaaaatacgaagaacaactctggcaggaaggttagacacatgtggaaggtgcagaggggactagtcagaaggcatgtttcatgatttaccaactagaggtgtttcaagcaggcttttggatgcaaagtggctttatgatacaaagattaaactctctacagaatcctctcagtgtattcaatatgagcccctttacttctttctgtaaaaatttactccatcctgtccccaaggaagatgtttttataaggtataagggaaatggaaggtagtcttcagcctttagagatgttttattgctttcatttgtttcagggtacttgactacactcaaaattatttctctggggtattcttacaaagctctcttggattcatctaataaggaagaataatttggaatccaaaattatcatctctgttagaggttctaatccatggtttcttcacagtgcagtatgttttggataaattgtgattgctaatatagtacctaagtttgtcagtgatttctttccaaaaaaagattgacgcacatttaagattattcattaatataattactccttttcatttgcattccatcctgctttttcatttgggaaagaaatgtgcagagggacagctggtgcctctgtaattacacataacccccagcctgtcttatctgtgcactcctgggagcgggtcacaaatgtcatcctctgtcttgcgtgtttcaattttttaaaaaaatgttgacaggcctggtggttccacctttcctaagtaattgatcattatggctgttgtgtaaccatttgtcaggtaagagtagtttgttttatttttaacttttgcagttaattaaaaaatggttttaagctcctagaatttaattcaaaagttttctaactttgcgctattcttgcaacttttctgaaatttgaaattatatgaaaacaagaaagcatcaaagcaataggaaaaaacaatgcttaaatggaccttctgtgggtccatttatcaaacattagtttgataaatatcatcatttttgaaatgtaattaattttcctggtaaggctgaatcattcaaatgggatttgcacctttcacagtctttcatcctcctgcccattttccctttcctttatctgatactcatgagtaataacaaaagcaacaactaacacttatgaagaagaaaataattttacttaggagtaaaaaggcttgtggaagttaagcttcactggccttgccatattcttggaattttcttttcttttctttttaaaaaaaattcctaggaatgtgttgtcattatatcagactagctctttggagtaaaccccagacctgtctccttatgtaccaggccaacagaggagggcctagacttgtcagccccagcctgaagactcagaagagaaaatctttgatacccatgtgaagatccacacccaaccagagtggctggccagtgtttgccccactggtcatatttccctgggctcaacatacctgtgttgtcacattagatgtttttgtaattcgggatttttcttctgaacatagatgcagacatttcagatacccacaaactatgtaaccaaacacagcctagctcaaagttgatattccctgagctttcctttatgcacgtgacttaaacacatgacaatatttgtctattattttaatctgtacaaggaaagaaaggtagtgatacgtcagtgaattgttcagatgggtttctgtttctgtttgctttccatattctctattttttataataataaatttaggatgatgtctaaagactaaaaagtagattcagattttgcttactgctttaacttatttaaaagtcctgtttttaggaggagtaagtagattgattttcctgtcatgctaacatgagacatttaatttttataatgtaatcttacgttcattagccttgtggctaatgataaaacaagataaaataaatggcattttaaaagtgattctggaccaggcgcggtggctcacccctgtaatcctagcactttgggaggccgaggcgggtggatcacttgaggtcaggagtctgaaattagcctggccaacagggtgaaaccgcatctctactaaaaatacaaaaaaattagctgggcatggtggcaggtgcctgtaatctcagctacttggaaggctgaggcaggagaattgcttgaacccaggaggtagaggttgcagtgagccgatattgtaccactgcactccagtctgggtgaccgtgtgagactccatctcaaaaaaaaaaaaaaaaaaaaaaaatgattctgattactcacattcttcttcttctttttttttaaatcctacttttgttagaattccatatctctaagaaaggaggaacaccaaaatcattgaaggttcaaggaccctctcccataattgctatcatagaaaatgttcaattctagtccacctgaatataaaccacctcaagccaaaatgaacagagttctcagtgccaggagaatttcatgagtttgggaagcattttgaatctctgccctcagtttggaaatagtttcatttctctgctaatgaagaagtccaagaccatatgcagtctacagaggttccatctatggagcaaaagttgggagcagaccagcagggttggcagcgtgaagattctagttctctctgttgaagtctcaactgccgagccagcactcagacacagagaatggtggttcccaaaagttttgggaatccatattgtgaacaggctgacactctgcctacctactgtttaagggaatttagactgttttgggaaacaatcgtgtaagaaggcttgcctgtgctgcctgccccagagtaaggcggtgcagtctcagacgtactggttggagatttgaagcacagtaatacactggctggtcctttcatttgttggttattctttgtgtttctggtatgagtttgtacgtttagataatccagtgaatctttgagctttttctttgtgaggtctgtttacacatttggaaatatcagtgaatatagttccattggtgttttgcggctttcagcttttgagttccctctgaagctactgccatgacgttaacctttgatgaagttaagagcatcagagggtagaagaaaatgattaccagtggttaacgatgtcccgatttgttaggagtttgggaaaagtgcacatttccatggagtctgcgtgctcacttggtgagaagctccctgaccacacgtaaattgagaaatagattgcaaaatcagttttgattaaaatgggaatttgagcctgccactgagaagcaaccatcttgctataaattatttatggcatgagcataggctttagtatagaggctgtaagcctttttccatcttgctttaaaaattgatttgattataaaaagaaaattaattttgctattgaaacaaatctttaaaaagggattttaaagtgactctaaggtagaaaaaaaaaattaccaagactcttccaaaaaaccaacttcgtagctggattctacaaaaaaagcataaatgctgaaccctgattaacacactttatcatattatatacatgagatatttcttacagagagtaccacagtggtgtaaggagcatatttttgtgaagtcctcagctttacaaacatatttagatttattcctgtgctaactaggttatatcatatctcccagtttagactgcacatggatagtccactgagcaatgtgacatgaagatggatgggcctagtagacagataccaggccgctgccaggcttgcagcattgactcctcttctgggatcatcacatgcccacttctccccacccatctcagctgttaagtcttgctgtgggatcagaccctcaccccacctcctacctgccgtgacttgacagggaagttcatttgggagattaaaaatgtagatggacagatacagtttcatgaatgattggaaacatggtatattctctgctttcattgcatagggtttgaggtatatcttgtggaccaacattatctattatatgtcctctatggtcttatttgtctttgcctccttgatctgacatggcctgaaagaagtgagctcagtcttctatgactcttgtgtttctctttgctgtttttaaaaattgtacctgttcaataaatgtttattccttatttcccatgtgccaggaatggttctcagctgtggggacccaattttgaataagaccgacaaagtccttggtctcatggagatggcatttcagtcaggggttagacagacactgcacaaagaaagaaacaagacaatttcagataccgagacgtgtgacaaagaaaataaaagatggtaacttggtggctagtgactggaggtggttcctgcttaaataggatggtcagagagacttgaactttcaaggtgaactctgagtgaaaagagagagacacctcctagcgtctggaggaagtggttctagcagagagaacagcaggtaccaagcctttgagacagaagcaaacatggtgtatcagaggagcaagttttacagtcttttccctgcacatgtatgctgttggattctcaggatagttttcatttctttatagcttttattctccatcactacacatgccctgcttcatctcctataactccagcgtaagtttctgacatcacatccctgacattggtttgcaactgccagcaggaatttgcctttttcactgtgggcctcatctgagtcatcagctatctcgtcattgactggagtggtctccatagttgtgtacatgtgccaagatgggggcagaggttaaatgatccacggtggtatgggaaaatataagaactttcatctgtatttaatttattgaattcaaaagaactaatcaaaagattgatgtcaccaccaagaaatcataagtatgggaggggatggatatgttcattggcttggaatcattccacagtgtatacatacaacatcacattgtgccccataaatatacacaattatttgtcaattaaaagaaattagtatccgcaccctcactaggttggtgcatcaaagggccctctgtctgggaaggtgacatgaaggagggaaagatccctcctgatgggaaggacctgattgtagtaccctttcctgttggcttacccttgattgggacatagtgcagccacatgcagcagggtgttgtcatgtggacgatttcataaaaacacaacccatctctagtcctcacttcacctgaggccccctggtgacatattgtagtgaaaataaccagtgtcttaaataggggttcgtattcttttagtgcccctctccaagatgggtgcatatccccaagctgaaatttggactatgagattttaattcatactgaatagaaaagctgaagaaaaaaatggacttttataagccacaagcaatttttttttttttttgaaatagagtctcactctgtcacccgggctggagtgcagtagcgtgatctcggctcactgtaacctctgcctcccgggttcaagcaattctcctgcctcagcctcccaagtaactgagattacagatgtctgccactatgcccagctaattatttttatttttagtacagatggggtttcaccatgttggctaagctggtctcaaactcctgacctcgtgatttgcctgccttggcctcccgaagtgctgggattgcaggggtgagccaccacgcctggcccacaagcaatatttttgtgtcaagaaggagaaacttcagtatttcaaaacctcttgggaaaactctcatatgaatgagccttgtatttgtgcaaataaaacagagatccactttgaaatgaaaagaagtttaaggtaaatcactctggtgggaagaaggttgttcagtgcatgaaaatttgcaactcatgtcttctcgatggtctgatcatcttatatgaaacatctcttttttgttgttgttcttgaaacagagtcttgctctgtcgcccaggctgcagtgcagtggcatgatcttggctcactgtaacctccacctcctcgggctcaagtgattctcctgcatcagcctctcaagtagctgggattacaggcatgtgccaccacacctttatgtacaaaaatacataatttttgaatttttagtagaggcggggttttaccatgttggtgaggctggtctcaaactcctgaccgcaggtgatccgcctgcctcagcctcccaaagtgctgggattacaggtgtgagccaccattcttggccttttttttttttttttttttgaggcagggtctggctctgtcacccaggctgaaatgcaatggcatgattttagctcactgcaagctccacctcccgagctcaagccatcctcccacctcagcctccagagtagctgggactataggcacatgccacactgcctgactaatttttgtatttttggtagagatggggctttgtcatgttacccaggctggtcttgaactcctggcttcaagtggtcctcctgcctcagcctcccaaagtgctaggattataggtatgagccactgcacctagccatctcttatttttaaaaaattttcaccattaattttgtgttgtctgattttcacattgccctccctttttcctttggttatgagttcccagatcttcctccagccttttgctgggagggagagtctgcatgtggagcacagagttttgtctcagccgaggcagggtgagggtggtgggtcacttctgccagagcccccttgaaccaactttgtgccttgtgggtaggggtaaacagggcagaagccaaggttatgagaggatttgtaaggccctgggcaccattagaactgcactgggacccaggaaggagtgttggccctgagtcggggagtgagcatgtattccctgcctccttcctttctttctgcaatatacttattgagcaccttctgtgggctaggcattggtaagcattagggtgtcaatcatcaataactaaattgcagaccttattgtctcttggaggaagctggcagtcagatcaatcacacagaagcaggaaaaattgcaatcttgaatcattgtttcaaaaagaggtacatgatgctgcctgcaagataaagggtgagttgccctggtctggagccttagaaggtttccgtaaagaaggagcctcgagtcaagcctgagcctaggggaaggtggggtagaagaaggaatggggagctccttccagcagagccaaggtcctttctgctttgtcctgctccgtgttcagctcctggcgcagggctggcgtctggggtatgctcaataaattaaaaacgagtgcatgaacagaggccagcagggctggagcagagcacaggggacagtgggttggcatggtgctggagaagctggcaggggccagacctcacagaggcttgtaggttatcatgtacttgtaggagaccacataggttaccatgaaaggagaccacataggttgttatgaaaatcaagataatttttagagcagaagggggagctattaataattacgcctggatagaaaggcgtaaaatgcaactgacttgggtgtaccgggatatggtcaacctcttaccagcttcctaggattttagtctttattctgagaggagtggaaggcccctccaaaggtttttagctgggatgaggtttggggtgtggaggcagggcatggcatgatcgctctggcaacagactggtaatagattgaaagtgagttgttgcaggagagagaccagggaagacggttgcagaaggccaggctggagcaggtgatggcttggcctggaggcatggaaggggttagaagtgatgaattgcaaatggctgctgaggaagggaagtgttgaggtctcagaattggataagtcctagtgccactggctgagtcaaaacaggaggagggagcaggtttggaaagaacgtgcaggttttgtttgtttttttgaggcagagtcttgctctgttgcccaagctggagtgtagtggtgtgattttggctcactgaaacctccgcctcctgggttcaagcagttctcctgcctcagccttccaagtagctgggattacaggtgcgtgccaccatgcccagctaatttttgtatttttagtagagatggggtttcgccgtgttggccaggctgatctcgaactcctgagctcaggtgatccacctcctcggcctcccaaagtactgggattacaggcatgagctactgcgcccggcccaagaacatgtagttttgtctagggtaagagtcaaggtatgaacttaagaggtttcatccttagtctcatgaattcccaaaccaggagagaataatggaactacctgtgttgcatgcacattcatgctccatcctcaccccttcacccaggtgttcactactcacatatgcctgaattttattaactaaaaacaagttctttccttcactagagatgaatgtgtttaaaaagcaaatattgagtaaatttgcatagcagatcaaatgctttcaaaggggtaaggattttggagaatgctttgttttgagaaagcctgaagaccctgagctagagacacactgtttagaaagatgagcctggaaacactagtgagggagaaaagcagaaatgagcgccggagactccaccaagggagtccgaaaagtcagggcactgtgggtgaacttgaacctgaatgtagaatggctcttacggtatctataatttgcaaacttcttatatactatttacataatagttctccacttagagatctttaacacaccttcttgttttttggaatgtgacaagttttatagctagtatggacaggagagaggataactttaaaatgtggtgaatagggctgggcgctgatggcctatgcctgtaatggcagcattttgggaggctgaggcaggaggatcgcttgagcccaggaatttgaggacagcctgaacaacacagcaagaccttgtctctttaaaaaaaaaaaaaaggattaaataaatatggtgagttggttgcagtgagcagtgcttctgtatcatcaattagaaatattgcaacggtttgatctctcagtcgcctgttagttcatccaaggaaaaggaaaggcagagagccttgtttctttgcatgtgtgacactcagaagccagcagttctgcaggcagtttcctaaggtctggctcccttggcaaacgttaccttggctgcaggtaactttattctttgtgaataatgccagcctggccaccgttgccctcttctggtaaggggctaatgctacaaacgtactgagttttacaaggaaggaaaactcaagctcgattttcactttggtcaactgtgctatgccagctggcataaatccctacaatgaaatgaatgtttggtttaaaatgttgtaatgtatactcagaccatggaaccatgtgagggtctaatcttatttacagttttggctttgaggactaccttgggtatccatatcatttcccacagttgggccactttctgtttggcaaaaaagatttctttcagccttttctctgcctgtgaaaccctgtctggctgcttcattagctaacacatgtgtgaatttgcatcattgataatggcagcaaatgcaaggaatatggttttaatcaaattttagtatctaatatctctgaagcttagggcatagaacattagaggcctgggataaacaattcatattcaatagcagcattttagcatttcttggtgacatatttacacaatttataatttagagatgagtttatgttacatggtaaaacttgagaatatgctgaaataacgcactgtgttgggagggggcaatgaaaatatggggctactatggcagtttatgcaggaactactttaagggcagtccttgttgccctacccagtgcttaattttttgtgaccaatctttggttggcacctctctttccctccccaactgggaagaaggtaaatactccagtcaactaagtgggctttgtgtttaatggaacccgtaatgaatacttacaaaggaaacactgtttcgtgaggcatgtacttccttactataactctttttaaaatttagattcttaagtaatccattaggttgcagtttggcccgaagagtatcacagataaaagctagctaccatactcgtttggattattaggatctaaagacatgatgttgatctttttatgctggatcagtttgatatttacagttcagttgattcatgtaatttttctaggaattgaatagcaacaagaaatacatctaatatcatgatctccttatgacattaataatacatgagaagaatctttaagttttacccttatgcaaatgccccatgcaaattacccaaaataaaaatggttaggtaacaaggtctctcaagagaaaggacaacatgatcatttagattttgacaaaagtaatgagatagcctattttttagatgttgtctgttcacaattcctgaatttattttttaattcctttctccctgcctccatcccttctttcattgatttaggccctgttaaaagctaacagtgatataagaatgctttatagagctggggtagtttgtcagctggccaggtgatgaatcatggaatagaattctttctgtgaccaaattaaaccctaatcccatgaagaaagcagtcattgacaacttctggcaaggtaaagactaagaggaccctttctttgttgttccgggcagctgggaggatgagcagcatccacactctttggctgagcattttgtagtacctctttgacccagggccatttgtacctctttttcttcctcctcttggcctttgatccctacaaattctccagggctaagtcagctggctccatgcagaaggttttagacaaggtttctctactttggcactaatgacattatagaccagatgatgccttgcggtgggagctggcctgtgcagtatagggtgttcagcagtattcctggagtctacccattagatgccagctgtgacagtcctaaatgtttccagacattgtacacagggaggaagggagcaaaatcacctcttgattaagaatctaaaattacagttctagattcttattgataaagcccttcatcttttttttttttttgagacagagtctcactctgtcgcccaggctggagtgcagtggtgccatcttggctcactgcaacctctgcctcctgggttcaagcgattctcctgcctcaggctcctgagtagctgggactacatgtgcatgtcaccatgccctgctaattttttgtatttttaatagagatgtggtttcatcatgttggccaggctggtctcgaactcctgacctcaagtgatccacctgccatggcctcccaaagtgctggaattacaggtgtgagccaccgcaccagaccttctttggctgtattattttgaggtaaactgtattgtcacatttcaccaataggtgctgattcatggcacacagtggattgcagcctgaaggtttcttaatttaaggaattaagggtggggaataagtttcctgttgaggactaatgcccaaggcagagttaatcaagaggcacataccaaaaataatttagtgtctttttatctcaccaaataaaaatactcagttcccttgtttgttaaattaggaacaggcaccataaaactttatttcataagaataactaattgtaaagtttacacttgtcacattaaggcagaggtgatgaaggaagggtacaggcaggcagatgatagatgaaggaaaagtagaatctgatttagaaagaaaaaaaggcattcaaggaggatagaaaagagactgaaggaagaaacattagaagaatttgagtgttttggaaatattacctgctcctcaaatagttgtaggattgtcatgaaaatgtatcactttttacctaccatattttaaagggattagaagatttatcagtgttcacaaagcgtgagttgctctaattagtaaatctgtagggaatcctgtctaaatagcagaattggagtggagggtgacatttgcaggtgcaaagaagctcattatattttggtttgttaaaaaaaaaaaagaagaaagtgaccatcaccagtaagggcaggtggaatcaagcagacaccaggatctgcctccctatctctaatgtgtaaggaaaaacaaggtagttttctgcttctctttttcattttatgagtgtgaaagttatggaatttacttaaaacaaggaataattattaaactgttcagagtatatgtagtctccaaatttaaatagttgaaggtaatcatctcagcagtgggtctcaacccagccagcacattagaatcgggtagggagcttttaaaatatactgatacccaggccccaccccgagagtctgatttgatttcattggcgtagaatttggacatagttattattttaaaagctccccaagtgattctgaggtgctgccagggttgcaaaccactcttctaggccagtgaatctcaaagtgtggtctctagaccagcagcatcagcatcacctgggagtctgttagtaacgcacattctcagcctcaccccaggtttaagtctcaccatggggctgagctttagcaatttgtgtttctttttgttttctttcttttctttcttttctctccttccttcctttccttccttccttccttccttccttccttccttccttccttccttctttccttccttccttctctccttccttccttccttccctccctccctctctttctttctttctctttctttcttctttttgtttttttaatacctagccgagcacaaagctaatcaatgtgtgtttttaacaagccgtcctggtgaatctgatgctcgcccaagtttgagaaacactgtgtcaggcaatgggtagtggtgttttgaagacatcgaatcctgagaatcaagggtgtgtaatagtggatgctggcagtattactctgaagtcaatgctatggtcttcagtgttcatttggctcaggaggctcttcacttatccgaggaggatacctgggaaatgtaactttccactgagagcctttataaggcttaattgctaatgtgtaggtagcagctgatacagacttgtccctcccactcttttcagccaagctttcaacctcactctaaatattcttaattaatgatcttcggcttctgaagccatttcatcagtggtctcctgtcccagcacgtttcccctttgagcattccttgaagagggtgttattcccagcagtcaactagaaaaggaaagtagaggtggctctacacaagtcctgtgaccaattaacgacctccctttattcctctttgtagttctctaaaaatgggtcagaggaagaaaaactcggctctcaccagcagacctcgcctgtgtttgtctaacatattctgtcccatttcaatttcctgccttaggcatgaattggttgaagattccctttgaactcttactcattctgtagaaattctctgtgatgaaagcagtcatgggattgtttcctgagttctgaagcagagcagaatagtgagggaaattcagtgctaaagtttaaggttcattctcagcaaaactaagggattattttgcattgaatgaattttgaattttgttttctcatttgataaagctgagtgagggtgaaaggtaaagggaaacaaacttcttaatcctttacttgtcagtaacagtttttattgcttcattttctatttacaaggaaaacacctttaaaataaaacaattctattggatcagcaccttctttggtaaagttcaaagaaatttcccaggttagtccctatcattccctcacatgtggtccttaggagccttctggaattccctgcaggatgggattccccttgcatcactgggcacttcctattatgaggttcccaatgttgcttgccctttgtggttttagtctctcactaaaataatagaaccaggatttctgaaccaggagtcactttaaggaagtgtctaggctgtccaatgtggcagtgactagtttatatgtagctgtttaagttaataaattaactgcttattaaccaatttaattagaaataaaatttaaaattcacaccagcctcatttcagatattcagtagccacatgtggcttgaggctaaggtattagacattgtagatatagaacatgtgcatcatcacagaatgttattggacagcagtggtcaattttgtcacccttgttaaataagatactgagactgagaatgatgtttgttaactactctcaattagttaattcctgtttgtggacactgcagtctgttttctttttgaatttaatcataacatctctgggagggcagggattattgtcccattgtacagataaagggattaagattcagagaggctgagaaacttggccctggctctgtggccagtaaagggggcagccagtgtttgcatacatatgtatctgtatgactctaaagcccatgctttgcatgttaaagtcactaaaaggtcaagtactcagatttttggggtctataagcccacatttttaggtgtaaactaaacaaacaaacaaaaaaccaggaagccaatggtgcattggatggttgaagtaactaaatcagtccaatgcaacaagccagcagtcaatcctttcctgtgtagttttcatcactcctcacagggagaccagtggcctatgataacagtgcaatatttattcagttgcccattttaatgggctttgtgtcaatagagttttctcccctgggttgagtggccagtgcacaccccctgcggcagatcacttcctgtttgaaaagtcctgctggtctgatcgtcttccttaggtggagccagtacctgtctccttatggtttctctgcttcatctggttctctatcccttaaggccctagagaactaaggattattcttccacctttgaaagccctgttaatattatattatcctggctattcttttttagattaatcattttactttcttcagctgatgctcatgacatgattttaagtgttgctgttatcctgatcactcttatttgggtacgtgatagtttgtctcaatttcaatattgagagtaattgagcactaaatgcataaagcctcatcctgtcacttttcccggccactgctgttaaggcagcctaacatgaaattaacatcatttacagcgatggcactctgctgcctgctcacagcacttactcttgactaagaatgcctccacttgggctgttagttttttggagccaaatgttatatgacccttacatatatcctagtttaattctctctagttagattccctctgaatcacagaggtccagttttagagttttgttttgtttcccagatccagtttttgctaccccagatatgcactgtccccttctttgcagtgacatccacctattttgtgggtatgtcccctatatattcatccattccagtgctggaaatgcagaccaagaccagggtcgaggaaaaagttgttcaccatccccatccaggttgctgtttggccattaatgggtcctgtggttatggctgtttaactggttatgaacccacctgtcatttcatccacttctatttttctgttgttttattcactaggactcatttgttcatagattcatttcattaatatttattgagctcctaccatgtgccaggcccttttgaaggtagaactgttagggtttgttaatagattggatgtgtaatatgggagaaacagaggcatcaaaaatgactccaacgtttttgacctgaactggaagaatggagttacaattagttaccatgtttgagggtaaacattaatagtttggttttgaacctgttaagttgtagatgtctatttgactcccaagtggagatgcacagtaggcaattggatatatgcctctggaggcgagagggaggtctaggctacagcaaaaagactaggagctctcagcatgtaaactgcccagtgtctgaaaccttgagactgatgaaagtgcagatggaggcaaggagaggtctaaggactgagccctggactctctagtgtttagaggccaaagtgatgggacaagccagcaaaggagactgagaaagtgtgtccagtgaggagggaggagaacgagcaaagctgacttctggtgtcccaagaaatcaaggaaagcaggaagtgaaagaaccactttgttagatggtgctgaggtaaagtagtatgaggatcatgaactgaccattgggcttggtgacatgcagatcattggtaaccgtgacagaagctgttttagtggagtaatgtgaataaaaggatgtcatgaggaacttcatttgattcctggctgaggttcacgtgtgctttgtcaactgccttcaccagtcatggcagctaagaatattgtcaaagaagaaaatgaggttagtttttcataattggggttttcttcaggctctcccttagtagtctgttatggatgaaatgtatagctgtaaaatccatctttctctcctttttgaaaagtgcagcatcatttctgtctctctaggtcctccaggtaactcttgtgctcctcctcatcccagtggtcgagccaggctctggtgccctgggatggattcctctgagcccagtcatctaactcattaaaggatttacatgcagttatatctgttccttaactgtttggagtttacagccccctttcttttcatttctggcctttcctttctgtttcttcctaaggctctcccttcatccagcaggtagatctctttttccctttggattttcatcatctttatcatcctaattcagaggtgaattttgaagatgctcagcaaggcactgttttatctgtagctctcaccctggctacacatcacattcacctctggagaatgtttgtttgtttgtgacagggtgtccactccagttgccaaggctggagtgcagtggcacaatcttggctcactgcagcctcgacttcccaggctcagatgattctcccacctcagcctcctgagtagctgggactacaggcgtgcaccaccattcctggctaattttttgtatttttagtagagatggggttctggcatgttgcctaggctagactcgaactcctggactcaagcaatctgtccgccttggccttccaaggtgctgggattacaggcgtgagccaccatgctcagcctttttttttctttttaaagaaaatcataatttacactaaaggaattattttcttgtatttatgataaaatggtgatttttttacttgtgagttttacagttgaaatatattctggtgaatatatttcctgttgtattacatggtgaaacttcatcaggtatttttttcttcctttctattgtaacctcaaaaaaagttcctgtattctacagagaatgctatgagtattcttccaggatacaagggggcctgtagcaggggctcttaaacttcagcatatgccagaatcacctggagggcttgttaaaacaccggatcctgggcccctctctgtaattgctgattgagtaggtctgagtaggatccaagaatttgcacatcaaatcagcttcaggagatgctgtggctgctggtactctgggaaccggctgctggtactctgagaaccggtagtctaggcttgaggctctagtgggtaaatatccctaaggtcgtacacacagagagctttcctgaactagcagagccaggatggtaagtgtggccaagggtacaaacaggcctagcacttgactttgttggggctctccaaggttctggtaaccctgagccctgaaatagtagaaactcctcattctgaggttgtgttttagtttgcagccacatacttcaatgctgttttgtctcctgtaaaggtcacacttagccctatctttggcctgtcaaagttgacacccgctttaaaagagtaaatgtgtagcccccttgatacacagtactcattctgtgacacagctgtacattaaaaaacaaaaaacaaagcagtactcatacaatgctaataccccagaaaaaattaaatgacagctggattgagcagagagtacctgtcatagctttatctggcaagtcctttgttgtattagaaagtaaatgagaagattccagggaaaaattaccactgtgggggggattccttaaattattttacctataaacaaataaactgaattcctctaagtcatccagaatccccaaagtatttatcaaagacactttggttccacccacagaggtaggaaaattatgctacctgtctttcctcttccttcctgcttcaagaaatctccctccaaaactggccaccctttagaacaatctgccaacctagatgttgattactaggggaatatttacaggggttttctttgactcatatgtagtttgtcataaattcctctaactcataaactgaaaagcttttctttcatgtcaggattcttcacaaatattaaagaatattttctaacatgttaattcttagtttaaaatcaaagccacattccaatgcctcatgatcacacatgttagatcaagtagtggacaaaatttgtgggtgctgatattcctgttgtttcccatactcctgtttcagattatagatgccataattgatccagaacatgctcctgaccagcataaatgtcactaaatatgagtgatgcttgtttcccagccactttgcaccctctcaagtcaggggccttacggacgagtacattgcagtttctgtcaggttgtcttttcatttcatgtgctctcttgcagaaatatgtaagaggagagttcatagttttacttgtaatgtggtgtgattacaagccatctgctctttttcgtagaagcagtgtgtggccggagtaaaaccgtgcagaagaattatgaggcatttattggctcttaataggaataggtggaaacctctgccctacctatctgtaaatcttatggaactaacagttcagaattcatttgaaagtctttggaatttaagacaaattctacctttggagaaaaaaaagagaaaagcagccaatatttcttccttgagccctttgtatggctggcatggtgcagaagcctcatgcccacattgtctcatgtcatcctcaaaataaaaccatgatgtagttttcattgctatctccattttatgttggaggaacttaacctgtgtctcagagccactgaggctcagggctaggatttgaagtcaggtctgtgctgaaccaggccactgttttactcattgccacacctgctgtgtctatgccactgaccagtcgactgagggaaggtacctgcaggtttatacttgaaataatcatgtcctgaaaaccattagggagggtctaaagaaatgaaatcagttctcatctttcgaagggacccccagagagcctattcccaaatgtattcttcatgcagtgatggctttgagagtttgtgattcagcctggaattctaccccagggtcccaggggcatatgttaaatttaagtagcccttcataataacatggttgaccattgctttattccacgcagtactttgcctcccatctcaaatcttacccagggagactgtgagccaccctacagcactctgggtcaaaactcaaaactctttctcagtaggataccagagatgatttactgaaggacatcacagcctcttatttgattttctcctccttttagaagctgctgtcaaagtcatttgttctgcttttccctcatctttctttctctttcctttgtgtttttatctttgtagaatccttccccaaccatagtaataaatctgttgtggaaaacaagtgactgggaagttacacatccttgacctgtagtcagaggtcccacaacagacactgaacaggagacaggagctccctcccctcctgagtccttttcacctcagacaagtcacactctcccaagcatccctttaacccgaaaaactcaagcttaaagaactagtcatccatttgcaaccaaggaagtttcctttaattggtctggattcacattgtcaaccagggctttgtacttgcatcttgttctgcctgattgactggaaagtggggaaatagccattccaattcacgagtgacagtattctgtgcatacctggggcaaccttagttgtaaaccattagcttgattctgcagtgttttttttcctgcgttcagggtgcaggtgagagggaggtaatccctcctagagagagaataagccagccacttaattttcatcactgatatatgttttcacttaacaaacactcttcacgaccatctgtgtgccagacccagtactagacattgacaacccaaaggtaacagaaggcagctcctccacaaaggccacctggtggatggcccatagtggactgacagaggacagtatgaggtgctagtctcagtgtgacacttttataacctccacaggaggacagacactatgtgtgcaggtagaatccaagtaaatggttgcaaaccaaaatgaccaggagatgagatcttaaagggaaggcaccttgaaggcaatttagttcagtccactcattttgtatatagggaaactgacagtagagaaaggaggtggttcaacgcctcctaaactggggcattattagaagagattcatggtctttggacttcctgcaccaggacattctcctattagtcatcaaagggctttctccagggcttcttttttttttctgaaacggagtctcgctctgtcgcccaggctggagtgcagtggcatgatctcggctcactgcaagctccgcctcccgggttcatgccattctcctgcctcagcctcccgagtagctgggactacaggcgcccgccaccacgcccggctaatttttttgtatttttagtagagacggggtttcaccatgttagccaggatggtctcaatctcctgaccttgtgatcctcccgccttggcctcacagagtgctgggattacaggtgtgagccaccacacccggcctctccaggccttctttgtgtgttatgatctcatattcaggctgtgtctaattctgttactgagattatggagtgttccttgtaccccacctgacaagtattgccaggttggcaaggcaccgcaccaaacaaaacccagtcatgatcaccagcgatctcctaaaagagaaagagtgcttttaaatttctcagtgtttccagaacgccaaggggtaatagtttctgctttgtgagttgtcacgagaattaaatgcaataatgtacagaaagggcttgacaccaagtctggcacacaagcgctccatgaatcttattgttattgccagcttgttcaccattagtagatttttgcaattggactaaatatatagcatattccaacagaatgactctttattctcccatctcctgacctgtctgctagtttactgagtatgccatccaaaaggtatgctggttccctttcttatatgtaaactacaagcttggatttcctgggccagtgtttcacgtgagtaactggccaagggaattcaattgacaacacacttgcattgacttttcttcagcttttaactctctggatagggattcttaatgttaggagacttctcttctaccctcacagctctaccccacctcttgcagggtttattgctgtcatcctctgctgcattcttttctttcccctcttcaccttttcttttccctaaccacccctcccacctcgttctttctacagtgaggctttcactgcctcactgcacttgtgtttcagcatggggccctacagtggcatggggccctacagtgagctctccgtatctgtgttggaatggaatcagacatggaatcaggctgcccagggaaaggagctgtgggaccctgttgagaatccctggtgcagtcaccaggcactaaggcgtaggctgttttagggcacacttggctgccattgctcacctagaggggataggggccagctcccaaataaaggggagtgggttccaggctagacagcctaaacgtgctcccacatgaggctggaagtgtgtcctgagtagccttccacaggggttaaatttcctcagagtaatgtctggcaatgtggagtctctcagatctggatttgattcctgggtctggcactcactgcctgtgtaatcttggactagaccttcccgaattcagcttccttatctacgaaatgcaaataatcattgtgctccttcaccagagtggcaaggatttaattgaatgctctgagtaaaacttagcacagtgcctggaacataggtgctctgtaaatggcaatcaatattttaaactgtgattgtttaatcacatcactataaaattttgcattgtaagatatatgcagtttgtggtaatatgaaaatatttaatatgttttctagaacttttttgtaaaattcacactccaggaagaaaatttccatgtcttctgaggaagcctttaggagaaactctttctagctgtagtatcagaaatgattcagttatcctcagcatgaattccttctcatcttcttgactctgattggtgctgtatttttcacatttgtacctaggaatctcagagccagatgttgcagagacttgggactatggtgggaatttcgtgcaggcctatcatcggtttcatcttatgtttttacccttgtttgcttttacttattctccccatttttaatctttgcctcgttacttgaagctgccttataccctcaatgccaggtaggtgtaaaatgccaatgacgatttgtgtggcttctcagcgacagacccatgtatgtaagctgcctctggaaacccagtgggcgtggtagaaacggaccacatgccttgggcctcacccttgtccttcctctccctcacacccaaccacatcctcttacttctgtcttctgagtgtccctcaaatgtgccccttccccttcacctcgagatcaccttgcttgatctcttatttgggttcctgcagtggctttgaacctgtctgcctggctccagtgatttccccttgcccgcccatgctccacactcctacccaagagagccctccagcccaccagcctcctcagcctgtccagggcccctctgtggcctgagccttcctgccctattggccccatctgccagcaatgccctgtgtttctgcattgagactcttttccgtctccaaagcacgcgagctctttctctgcatggggcgttattcatttttccttctgcactcctttccctgttcctcagtacttgactgcgacaccacctccccttccctcaccttcctcaggcagagctgtcactccgctccctctggtacttgggtatgtgccgtggtcacacatgccacagtgcccagctgctgcccctccctctctcagggcctggctagtgcccctgtgaaactcagcaggtgtttcagatgatcaatgagtgcatgagagaatgtggggacctttctacatctcttaagagttctgagtctgctccagagatggctttgtgggtgagaaatgttaatattttcacctttattcttatatttaatgtaaacacagaagacaagacctcccacctccgaggacttggaaatagtgtgagttgcacctctggaattcttaggaaagagataggaaaaataaccaacacgttcagttggcagtgagtttccagtgaagtaatcctaagattcttgtattcccatttcacgaaatatgaaaaatgactgcttgttgttgctgatggcagagttgtcgctactccagaatagggagagaggaagttgttctatgatgtatcagtgcactgggccgaatagtaacggcttggtccctggaaagggcttagagctctccctttgcagacaaggctgtgatttgcccaattcttggggctaacttgttctgtcatttgtttttttcatttgtcttcctttcattaaatattaagtattcactgagggctggtagtgtgttggtcactggggatgcaagattggcagaggtatagacctgtctccatggcttatagcctaggatgggggccctacatggaccagtcacttaatgtagaaataaataatcacatgaagaatgggctggtccagagcagggaaagagaaactgttcagaatagcttcacagagttgaccacactcctgctagggttcgaggatgcataggatctcaacaagcatggaagcagcgaggcaagttgtaatgtaagccaaggatgaaaacgtcaggtgcaggagacaaagacatgggcctcattagagcttgtgagttgctgctctgagctgcagcaggagtggactgatccgatttataggttagagatttcccagatatgcattgagggttcatccaggacaccaacagaagtgactgtaatcttccaagtgggagaagataggagcagcagagcaagagagaagtgtgtgtgagaacgctctaaaaaattaaaatggacaagatgcgtgactgattctggagggttaggggaagggaggagttgggggtgacacccctgttgttggctgaatcctctgggtggaggggatagaagccagaccagaccctggctgggggactcgcagcccagtgcatgcaatgtgaagctattcctagcagcctgatggttgctcaagaggtggcttggcctctgcagagtgaccagttctgggctgagaaagaagtgatggttaccatgttgcttctctcagaagaaagctggagagttgatcttctgagactagaaataaccttctcctaattaggaggaggagaaagggaggctgtgctgctggcagtgtaagaagctttcttttcttttttttttctttttttttttcacttctgttttctcatgagtgacaagaagcaaagctttgagagcagggaactttggaaaggcagaatacctctgcctagtgtgggagggagttgagagagctcagaactgcaggctgcagagggagagccccctgcgggggaggggactgcctgccaaacagtggaggcttccagaaaccccaggaaagtctgctcaccacagtaagatttgacaatttatttttctaaaaagagacattctactcaatctgtttattttcaaacttagactaggttatttgtgatcaaagtcacaaaatggtgagaaaaataccaaattggaccttactattaggttaattcttcagcaagctgctgttacagtatcaattcaagttgcttaagcttaagattcccctccccccaccccctttttttttttaaagaattagttttgcggtggtaggagggttacaagaaaaaaaaacaattagttttgctaatgaaaaggtagcagtgaacttggtttagattaaaaaatcaggaaagagcacctgtaggaacctgcaataaaatgtgttgagacatgttttaccgctttggaagggcttttattccagaatccttggaacttcaatgggcctgtgattgaattcagaggccagtgaacttgcatgggaaaaagttacgtctttattgtgatcaagttctagtaaatttagttttcctttttattatgaacgtgggattcataatcaaaatatgaataatattagcagtatttgtcaccattagaaattatagctcttttcatattacattaaggttgttgcagataatgaagatatcatttatgcttatcgccacttcagatttgtagtagtactagatccatcactatgtgacaagacccaatgccttaataaacaaggacatacattcctatgtctcaaatttttctttcgttaagataactgtacttcagtgtaattggttttcttgttaatcctatgtgttgtgtttcatgcatttaaaaatattattctgagcaactttcatcagcttcacagttggctaaataagtccatggcacaggaaaggttaatattccgtggctaagatcctgtagttgtggcatgcgacctccacctggtggcagcatactccttaaaggttaaattctgtaaccaacagttgagaaggactttaacagtatacttgagtggttttcaaacattttttattacaacccacaataagaaataggctttccatcataactgagtacacacttacttacatttcacaaaacaattcttgatctaaccatatgacacattgatattttgtattgcattctaatattatcttcagttctctttcattaaaataaaatgctggttgcaacacactaaactgtaacacactaaagtgcactcttttacatcgtaggaaaccatctttcaacatgcttcacagtttattacctggtaaacttcatttgggtctcccacacattttcagggacgtaatacctacattttaaataactgccaacaagtatgagtgcattttacacagtgtttaaaaattgtttattattgatgtataatttaaatatagtgaaaggaactgattgcagtgtatacataacataccccatcaagatacagaatagtcttatcacatacaaagttcctttgtgacagttctcacccagttttttacccccctgggaaattactgttttgattcctttcatcacacgttgattttgctgttttagaattatatatagatggaaccatacagtatatgttattttggtctggtttcttttgctcaacctaatgtttttgagatgaatacatgttgagtctatcggtagtgtggtgagtagtgttcccttgcatgaatatggcacaatttgttctcttgttgtagacttttgggttgtcttcacgttgggttattataaataaaacttccatgaatatttgcatacaagtctttgtgtgcacatatacttcatctctcttgagtaaacacctgggaaggaatcattggctcagttgataagtaaatgtacgtttagctacaggaaactgacaaacccatttgccagagtggttagaccatcttacatttccactgggaaagtatgagagtctgggttgttccatatccttaccaacatttcatgttatgtcagtctttttaactgtagtcattctggtgggtattgtagttgtatctcttggtggttttaattttaatttgcctgatgactaatgatattgaacacttttttcattttcttattagccattcatttatcctatttgtgaagtgtctattcaaactcaggttttttgttttgctttttttaaaaatatcagtttgtaggagttctttacatattttgggtaccagtcctttttgccagatacatgtatttttgaatacataaatacatttctcccagtctgtaacatacctatttattttattagtggtgcttttttcgttaacagaaatttttaattttgaaaatttaacaattttacaactatttttctcaatatttggtgctttctggatcctaagaaatcttttcctattccaaagatcaggaagatagttttggcttttttgtctaggtgtgtgatccatctcaaattaaattttgtatatagcgtgaggtaggtgtcaagtttcactttatatttacatctgatggtctaaccatttgttgaaactactttcctttcactgttgatatataggacagaatttaaaaaaaaaaaaacaaaactgtccagccaaggaagtgaaaaaactgaacctctgagtctcataaaccgaatctctgggtctctcagaccatccccaaccttggtgtcccattccttaccaaattagtttgttcacagttatcttgtgattctcagaaattacttcactcatatgtgaggatttataaggcaacaacttttcacagggtctgtaactgtgctatccagtatggaaccactagctacatgtagctacttaaatttaatttaaattttattaaaaatgtagcttatcagttacaatagccacattttaagtgctcagcagccacatatggccacatacggccacatatggctatcttattgaacagcatatatatagaatatttccattattttctaaagtgctggacagcgctagcctatagaataagaacagagtcaggctttgtacagttttgtagcatactttaatgaattttgttttgttttgttaactagcattcagtatgtatctttatcttcttgcttatttctcattcttccatgttcctatttcaattccaaagtgtaccgtcctagccaatccttttgtccgtctaaaaatgcagtatcttatatctgttatttgctgcttagaagaaagaattcccctggctgtgcatggaatcattcttttgtggagcctacctagtactgacctatttaacttctctcgatgcttcacgtcttccaactgctgccgggatgcttggacatcccctttcaaggtgcagcccagagacagatattttgtctttcctgtcttgattaacattgcatctctccttagcatttccactgtaaatgttaaacttagggaaagtagtagattatgacctgtaaccatgttctttattaaaagttctgtctagtagtgaactttgttgccatttcatcatgagcaaccacataggaatttgtgagattttctctcattgtttgctgggcatgagccgcacagacactgactctgccattaatgtctttcagtgtgggaattttgctgtcctcgtggatcttcatatcttgccacaaggttcaaacaaagatacaagctggttttctgaacagaagaaagaggtacaacaaaactttctactatttaattgcaagtagctgctgctgctataagaaatatcagctctttccagctttcatttctgttagtgggaaaaaaatgttgcgtatttaatccttgaaaaacaattgtattcccaatgacagacacatatgcacccactttttttttccttcagaaactgacacattcataaacttcatatgatactgtattatttaaaccagacattttatacctctttgttttgggggaaggatttctatatattcaaaaagaggagaagaagaagaagaagttaaagtgactatttcagtaatcagggattttaacctgactggttgtgaaggatggcctgagcacctgaagcaggtgtggcagttaacacaaggctgaaccttcacacccatcttaaagcctcagcttttattttctatcatccttgtattatcatgagcctttgacaagtcaggaaatacttgacggtgttccttctcacaatggtcagtcaggaaagccagtagccgggggcttagcagagcatgatgctggacttcactgagcctcagcctcctcatctgaaagtgaagaggtttgcctagatgccaaattcactcctggttctaagtttcaacaatcccacccaagtgctgcttgtggtggaggcttacaagctgcactgagctctcaccattgctttgcctccttctctgatccctgctcaccagagagcaggagtaaccagcttgtggcttttacacacctttaaaaatatcattatccgtgatgtccatttaccacagttgctttttagactgagaaataaaaatcagatttgttaaaatatagtatatggcgaagaaactattgacagtggtgaaaaaacaaaaagccacccttttctgtgataattgcttttaattagcttttggagctcactagaaaaaagatccccaccccccaaaaaagattttataggataatacattttcattcaaaggataatattatcaagactttgctgtcattattttgcaaagaatacctggtgacctaaagctgagaaaaggaaggcacaaggttctgtatggtgggatttatcattcaggtaaataactgtggactcttctcttcaggacttttaaatatttagcaagtcaatcaacatctcctactgccacttaccttcatataattccactcctagcttactaacgcatgttgctgtgattcaaaactgttcactcgtttccccaaagtgaccaatagtcacccaaggggacctcaccccaaaatcttctgacttgacttaaattaacaatgttatggaatccaccattccaggcctgttctccattccctttcggctttgccaccttagacctttatcggccttagacctttcttgttaatattgagtccgttttgcccaagattcagttaatttggaatgctttagaataaagccctgggtgtgtgaatcacctcatagccaaagcgtgaggctaggtttttgtttttttaggagccacatgcagctgcgtggatgctcatagtacctacttgagggcagcagggcatgacttagcaaagctgtgcagtgcatgacaggacctgcagagcagtgctgcactggcagctgcaaggggcaggtcgctgtagcaggctgagcttgcctctcaaaaccaaatggtcggtttgctgctgcttctttaatttgcccttttaaaatgtatattggccaggtgcagtgacacacacctgtaatcccagcactttgggagcccaaggcaggcggattgcctgagtctaggagttcaagaccagcctgggcaacatggtgaacccccatctctataaaaagtataaaaattagccagatgtggtggcttgtgtctggaatcccagctactctggaggctgaggtggggggatcacttgagcccaggaggttaaggctgcagtgagagttgtgatcatgccactgaactccaccatgggtggcagagtgagaccctgtctcaaaaaaaaaaaaaaaaaaaaacaattcgctgatgttaaaattcctctgggatcatttgtgtgtgcgtaagaaaggagaaaagctagttgaagaaaggctatgactttagcttaggttcagtgtccccaggctttcatcttctttatccttagatcctctcatgattgggattttatgagcaaccaatttgattccattttaacagtcattttatacagtgaaagcctaagaatatccagttcctttttagaaaaaagaactaattacatgtattaacatatgtttattttgagtgcagcacgagtagtctttgtacccaaacagttgaagtcaaactgttccatgtgtcaactcgaggaagcgagcacagcccgttagcctagagatgccctctgcatctctgtcttgagcactgattttaacttgttcttcttatctgcccctcaaaggtagctgagaagttttcttttcttgcattgttgtggttctgaagagaaagcttcatgacgtgtggtgtggtcggttactggtgtctatcacactgcacttggtctaccttgcattcgtcaaactgactcacagaaggaaagccccacagctagagggagaaagtttgtgtgtatgagcctttgctttatttttgtcatgctatttttagttttagccttatagggcatttatagccaaattttagcaatccttgtttccatgtatgtctttcacatattttctagcccagtcatagttgaactctgcatgtgaagcaaaattctttaattgttttttaaaaaaaaaaaaacctatgaggcggcaaggctgcctttttgttgtgtgaacaatgccgaaacactcaactgtaaagggatatctctgtattccatgaggcactgcatctttaggctgcaacatgaaaagcaggagagaggaaaccagtgtttgtactttatctagaaactcacactcatgagttaaatcaagggttttctatattgtttgaggagtacaagtgtttttaataaaggaaaagttttgctatcattgctctttagaacagctaaaaattttgttgttttaatttgtgaagattctaagagatcaacctgagatgacattgcaagaaaccagcaaaacaggtttgaggtgacctgggcaactctgagttttctgcagtctttgggaattaaacaggaatcatcagttcttatacatcagttcttaatctaaattaagaaatttagatttgtgtatgattttactctctttttctacattaggtcacaatttcctgttagtgcaggaaacaactgcaaagagtatcttcccattgtgttgggcttaaatttttgtttacctttattataaataacaccaaaacaataaaacaattgacctatcctgaaacttactagtgataaggaatactgaaattgaattaaaaccatgtgtttctgtcgcctaataaatgttaatctactttagagaaattatattattttcactgttagtacatgagtgtagtacgtttttacaaaaacaaaggcatatacagtatcatcaacaagagcgtagaagaaaataggattagtgatttccagttctctgcttaactcactgctcaacagtttccttcttgagtagatttgtaaacccaagaccagaaactaatgaatgatggtgtttagatttttaaaaatttttagaccaagtttgaaaaatgggatagtttatataaaaattactgtttctgactccttttgaacaaagatctagcaacactgtgcctataaacatgaaacagtcccctaaaaccatggggggctgcttgctgttgactgggctgtggtgtgggttccccatgccgttgcaccagcagtggatgaatatgcccttactcctggccccatccctgtctacagtcccctggccacactgggtgtttccctggggcccttgatgccagccagtgttggctcttcttgacttatttcttctatttgtcacagtacaactgattgatacttatatgaaagcattctttaccatacttattacctccttgccctgatgtttacactgaaatatttttatctttcttttagaaatatgaaactgaggcagaaagaaatgaaatgactttcccagatcacacagtgagccaacatcatggtttcgagcaaacttcagtagcaaatttaaatttgcggtgttattcatgagcacatatgacattcctttcaacattcacagctaaattaaaaagcaaaatgaaatgaaatgttcattgttaactttttaatatatatgttaatttttttgcattaaatttgaaggttatatctaattttttatttgctttaggaagtctgtttactgttaaaagaaaccattgattcaagagttcaggagtacttggaagttcgcaaacagcacaggccatcaaatgcagaattcacaagatccaatcccttgtccttaaaaggtaggcacagagcactttgattttggacaaaaaataaatagaatttctgctccgtagagatggcaattatgtttgactctgactgtcatgttagtatagtgatacattttaaaaatatgtcctaatgaagatactttgtttgggtaaagaaaattaactgaagagccctcaggacttttaatggtaggcaaaatgtataaaaatagcaaataaaacattcctaaggaaactgtaaattgtttaaaggattgttttttatttttaaggtttttttatttttagtagacttaataattgtacacattcataggatacagagtgatattttgatacgtgtatacaatgtgtaattttcaaattagagtaattagcatatctatcacctgagcatttatcatttctttgtgttgtgagcatttaaaatcctcacttatgtttttttaaaaaatatacaataaattaatgttaaccatatttaccctatagtgctatagaacactagaacttactctagtggtagtcttatatccattagctaacctcttcctatccttcccttccccatccttcctagtcttctaatactcacaactctgattgtatgagctcaatttttttaataaatagcttctacatatgagtgagaacatgtgatattttattttcttattttctgattacatcatcaaattttaatatgtctatatatctatttttcttttttctttttttttttttggttatagtagtaagttcttaagtggtgatttgtgagattttggtgcacccatcacccaagcagtatacactaaacctgatttgtagtcttttatccctcactcccttccccacctttctctctgagtccccaaagtctattgtgccattcttaatgcctttgcatcgtcatagtttagctcccacttacaagtttggctttccattcctgagttacttcacttagaataatagtctcaagtcccatccaggttgctgagaatgccattaattcattcctttttatggctgagtagtattccatcgtgtatgtgtgccggacttacttcacttaatttcctttgggctcatccgtgttgctattgaaacaggaaaagataccttatccctgaaacagggcgtgggatggggatgtgtcatcggtgccctgcggctcaacccttaggggaacatacagacgggcagttcataggaagcatgggctccaatcctgcagcagcgtctagggttgagtgtttacagatcctcaagccccagtgggcgtgtgttacaatgtgctttttcagtttagccgtctgcaggcgggttgcgttaatctactcgattaggccctctgccttatctcaaggacagagggctttctgtatcccgggttcttgccttggtgtaccggaaatactggatcacacgtgggcttggagaatgggtgcaaggttttactgagtggaggtggctctccgcgaggtgaatggagaggccagaagggggatctagtgggaaggtggtcttcccctggagttgggccgcccagctgccggactctccgactgcccctggcagaatttcacgttatcccgctgtccatggcctgccggaatctgctggtgcctgtcagaacaacttcttccgttcctctgctcctcttgttgtccagccgcctgtgtgtgtgcccgctagggtctcggggggttttataggcacaagatggggggcgtggtaggccatggtgttcttggaaaatacaacatttgggcgtgaaaacaggagtgcctgtcctcacctaggtctgtgggcacaggcccaagggtggagccctcaccagggaccctgcccttctctacccagcacttccttgcccctctcccatatcaccatgaatgacagattttattttatttatttatttttttgtatatattgctgaatagtattccattgtgtatacatacagcacgttttctttatccattcatctggtgatgaacatttagattgattccgttatcttagctattgtgagtagcactgcagtaagcaagggggtacagatctcttcaatatactgattttcttcttttgttaaaatacctagtagggagattggtgggtcatatggtaattctatttgtagatttttgaggaacctccaaattgttctccataatggttgtactaatttaaattcccgtgaatcatgtatatgagttcctttttcttcacatccttgccagcacttgttagtttttgtctttttgataatagccatcctaactgcggtgagatatctaattgtggttttgatttgcatttccctgatgattaataacgttaagcaatgtttcatatacttgttggccatgggtatgtcttcctttgagaaatattcaaatcctttgcacattttaaaatcagattcgcttatttgctattgagttatttgagttctttgtatattatggacattagtcccttgtcagattaatagtttgcaaatactgtcttccattctacaggttgtctcttcatgctgttgattgtttcctttgctgtatagaagatttttagtttgatatagtcccatttttctatttttgtttttattgcttgtgcttttgaagtctgattcataaaatccttgcctagaccaatgtcttgaagagtttcctctgggttttcttctagtagttttttagtttttgggtcttaaattcaagtctttaattcattttgagttgatttttgtatccagtgagagataggggcccagtttcattcttctgcatatggatatccggttttcccagcagcatttattaaagaaagtgtcctttcccctaatatggttcttggcacctttgttaaaaatcagttggctctaaataagtgaacttatttctgggttctctattctgttccattgctctatgtgtctgtttttataaccataccatgctgttgtggttactatagctttgtagtatattttgaaatcaggtagtatgatgtttccagctttgttcttttgctcacagttgctttggctatttgggtcttttgtggttccatacaaattatagtgttactttcttctatttctgtgaagaatgtcattggtattttggtagggattggttaataaatgcttagactcttgctaaactgtcaatttctaaaaggtatgagcattgtggacccagctcgaccacaggattgattttcactgatgacagaggttcattttgttctaggctgtgtagatctagacacctgcagggacaagagggacacgccatggtataccaccgtcttatattgtttattaacagcatcactaaaaacagaaattgattcatgcttttactttgtcatcagtgccaaaaacatctctctatacatttatctaactgcctgttttcagctgatcctatagtcttttaagcctgtttcaaaaccaagttcaaaaccactaaccaaaaagccatgcctatttcctcctcagtcttcagttctatgtctcatgttccctgaaaatagagttgttgtttctgtgtaggtagtttggatgaatgtggattgtttatgcttttgtgtaaattggatatcttctctcatttgcatgagttccttaccttttgttacatttccagatccatatattggaatatgcctcaacttgggtatatatacttaatatacaaccctggataagctgaagtctctaggctggtgactttgctcattgctataataatattaatattttttatgctttgagatttctttataaacaatttgcataaatgacttggaggctgtttttccaattatatgatataaaggagtatgaaaattactcacaaacttggtcaaagaacagcatagtacagacattgccaatagcctcattgtttttaagagttactgaaaatttatttcagtatcagtaaaaattaatggtataaggctttttaaagacttgactgtcaattcccatcaattctgcctcactaatgttttttcctcttaaccttgccaatattgggtattaccagtgtttttaatttttgccagactgacagtccaaaaatcaaaaaaggagatattgtgctttttgatttttatttatctgtgtgtttttatgtgtttactgacagaactgcatatttatagtttaggtttgtggtttttgccttttccctcctaattttttttttccttttgtcactcccttggtcgaggcccgtcttgatcagctcttaaattaatgccacagcctgtgattttcctcttaattcatccacacctctgctgccagagtggccttttgaaggcaaaaatgtgatagctcccagcttgaaaccctctgtggtcaggaaccttagttgcctgacattctttatttcactttttctctgcttgagactagccagagtgggtctggctcttaagcagagaagaagttgattaaagatattagatagctcataggatctcggggagtgctggagagccctgttgtgaagctacgcaaaacagcctcagccatgagtcggggacagctttgagacatgctccctgtgatgcttaggaccacgtatcagaagctttgccgagcctcatcctctgccccaccctgcagagactgactgcccggcctgtggccacagccttgtgctgttttttcccttttgagtccaccacaaggcaaaactagatttcatggttgtctcctagttacaagtgagtcaggggaggcaaaatgtttggcttttaccttgggaaagtgacacttataaaatgtggaaagtcatcaaaacataggatgatggtcaacaattttgagtgggtggacacaagttacaaatatccactaataactttcctcttggcttccttcttccatgagcttctaatcagtaacaacaagctattgcctaacagcctgactttcccaactacaaaggaaatgtgctcaccacatatccttcaaaagagatgacccagagtctcaagtcccagctccaagtccaggacttctaagtgatgtttactccccttctagttcattcccagcccatatttgttaacttttcaactaaataatgaagtgaactactgccaacaaaccttaaataaaatagtagggaaacagccaaaaaagtaactgatgtataaataaatacatgatgcagcaaaggacagtgaggtaggtagatgctaccattctaatttctgtaactgtgaaataagtagttgatgtttgtatcttccctcctctatttattttgtattccctgtgttcttcgcctgtaactcatctgattagcattctttaccttcattcccccaggatttgagctgccagtggtcctgccttgatgagattgccattgttttagttaacttttagcactgggtatgtttcaccaggtagaactgattacattttttttttttttttttttttttttttgtctatatacctctctccctccattcatctcatcatgagccagcatttcaactcccctttggcctgtttgtatattgccataaagagcctgaaacagtcacatggtactttgaactttcagcccgattcattgttatcatctgtgttataatcatcctttgagtactaaggaagcagagtcatggggatggaacgtaaacgtttgctgaggtggtcacctcgcttttccagtccttcgttccaggaaccatgtatctggccaaggtagcacatgttctgctggtcggagcctatattgcatcccttaggaccttactccagttctacaaggtcctgcctcataatttgcatcacaactgagttttcaatagacctttccaccattgagtaaggccagctgcagttgagctgtgcttgattgtttgtaagaccattgaattttacaagcctactgtcttattttgtttcctgtaaaatgagctgctttgtcagaatcgcagtggtggtgatggcaagtgaggccttcctgaagtctgtggatgatgtggctggcagaaacatggcagacatacagggcacatccaaatccagaagaaagctccattttagtgaagataaggcattggctcctctgtgatgaaagaggtcaaatgtcatctacccaccatcactggcctatctccctatgaaatgagagttggtggcaaggctcagattaattgctattgctggcaaattgggcatttggcagagctcagtcttgggtaggttaagtctgtgttgagccctagcagaacattcatccatgcctccatggccacattgcttatgagccctttgagcaggtactttggcagctagggaaagaggccagccagcatccatggggtatgtcaccttgtcttactcattataagaacctctcctgaatggggcttgctgtggtgtgaagtatcccccaaaattcacacattggaaatggtccccaatgcaatagtgttagaaggtggggaaagtatttgcatatgaaggcagagccttcataaatagtttaatgttgttttaaaagggcttgatggaggcctttttgcccttcctccttctgccgtgtgaggatacagcattccttccctctggaggactcagtgttcaaggcaccatcttggaaacagagatcagactctcgccagacctgctggtgcctggtgccttgatcttggacttctcatcctccacaactgtgaggacgtaaatttctattctttattctagtttgtggtattttgttttagcaacacaatagactaagacagggctctttggagaactttcacaaaatgtataaatattctcacactctatataacttttccccaaatatttatgtcaccagttcttgatgaccctctcttcaaactattaaccactgccagtgaatcagtatatatttgtttctcaggccatctctccttataggccacatagacccaaaatataccactcaacagtctgctcactggacagatttttcttttccaccctgagtgaggttatatcatcacattcattcacttctggctagtaccatcccattgggcagtgccactgattaggcacaaatttttatctgttcataactggcgagtgaagctattgccttttcaggtctctcatagtggtcagagaaacacacagacatactcattgatgtttgtgcctatttcttagtagtaaggggtacaaggtgtaaaaaacttgactttccttttagatgagctttttcctgtgcaccaggccattgtacattcagaaactgtattttgaaaggctttatctgtcaccatctgacatgcctgtgtcttagcatgacagctagaatacacgccaccttgtgctgtgtaagtcctatcataatgcctttggtgtggtagaccagaacaatgtcctgcaagatagtgagataatgaagttccctgtagattcagtagtgtcactgaagcagaatgtcaacagagcaatgaggcaaaacagtgaagctgcgtgactttctctgccagtagatagaaacctgcttctgtgttcgctgttcactgagatagaaaaaaacagattttgctgcctctgtagtactgatgctaggtgctgtagttctccagctgagagatcgcctctggaagaatctctggctaattaaacttatattaaccttccatcattctgtaagactcatctgtgttctgctttaccaaagaggaaagtgagataagaccatatgaaagatgctcatggatgtttcaggtttctcatggcggcagatctctttgatctcctagggattaatactgattttagtttacaattttggtgggatgggagaagttccagaaactttcacctagcccataattactgtaatagttctcactccctgaaacatgaattccaactgtggattctgtcagttgcagaataaacctatcccaaggatacactcagcaactgggaagacaactgcagatttttacagtcatgctgtgcccttcgtgagatgaatttaagccacatttctagatgtcaccctctggtggatcacagcaataatcaggaacccaagaattatctcagagccaatgcctaatcctcctcaaaagttcgaatatttctctttttcccttgtgcaaataccttagtaatctctgttgatcccacgtggaagatttaaaggatgcacttgtaacgttattgaagggtccttacttgaggactgcctggctctcctttcgaggagaaaataagtccgtgtactgacccaaatctggagactggccaggtggcaagtcaggtccctgtgcaccagatctagattttttttttttttttttttttaatttgagactgagtttcactcttgtcgcccaggctggagtgcaatggcacgatctcagctcactgcaacctctgcctcccaggttcaagcgattctcctgcctcagcctcccaagtagctgggattacaggtgcgtgccaccacacccagctaatttttatatttttagtagagatggggtttcaccatgttggccaggctggtgatccacccccttcggcctcccaaagtgccgggattacaggcatgagccactgtgcccgacccagatctagattttttttttcctgttatacagtgtattggtttgctagggctgccataacataccacaggccgagtggcttaactaacagaaatttatttgttctcaaagtctaaagactagaagtgtaagatcaaggttagtttcttctgaggcctctctcctttgcttgttgatggctgtctcctccctcgtcttcacatgagttttcctctgtaaatgcctgtgtctcctcttatctagaagtctgagattaaagtattggcaagttagtctcttctgaggcctctctccttggcttgtcgatggccgtcctctccctttgtcttcacataattttccgctataaatgtctttgtctcttcttatgaggatgccagttacattggattaggccccatcctgatgacctcattttaatttaattacctccttaaagacctaatctccaaatatagtcacatcctgaggtactgggagttaggacttcaacatatgaatttgcagggagaggtgcacagctcaccccataacatacagtttaagtagagtctaagtatgttctccgtcttatttggaggtatggacataatcaattaactggtaagccagagacagctctggggtgcaccactctgaaagggttctgaccaaggtcaccactggatcatggccctccagtagaccaagtgacttgtccagccatgtgcttaaattgactacaaatttctactcacccagttaccaactgccccacctttactcttgagctttggtactgtgcagacatcatatctgttccagctgttaactctctcagcagctaactcttactccctgggggacatccctcacccacaaggtggctatccactcaggagtggccttggtagcatgtctttctcatgttgagccacataccattttgcagatagttctggggaatgcagggggatcaccgggcacaggctggtattgtcacacagatcggcatgcagacagatcatgtactctgggcatcgtgtaccaaggtgtgctcctatgtatcacacacatacactcttttttttttttcttttttttgaggcggagtcttgcttctttgcccaggctggagtgcagtggtacgatctcagctcattgcaacctccgcctcccaggttcaagtgattctcctgcctcagcctcctaagtagctgggattacaggcgcctgccaccacgctgagctaatttttgtatttttagtagagacaggttttcgccatgttggtcaggctggtctggaactcctgacctcaagtgacccacccgccttggccttccaaagtgctgggattacaggcgtgagccaccacgcccagccacatgcacacttgttttttgagacagggtcttgctctgttgcccaggccagagtgcagtggaacagtcgtggctcatggcagcctcaaccacctgggttcaagtgattctcccacctcagcctcccgagtagctgggaccacaggtgtgtatcaccatatctggctatttttttaaaaaaattttgcagagatggagtctcacgatgttggccagactggtctagaactcctgggcttaagtgatcctcctgcctcagcctccgaaagtgttgggattacagacgtgagcctccatgcctggcctgcatcacccttttttattgggcagcataaaagtgaccttgtggagttgggggtggcaaacatttgagtcccaggttcgggcaccgagcagtctggctgcttaggagtatgctggacaagccagttgcccaggacctggaggcttttgcagtcttccagctagacctgcagtcggctgagttcaggaggatcctctctccccagggactaggagtcattattcccagatggccttggccagcaaacccagagagtgcccatggtcattgatcagcttgtcactctcccctaactccatccccagagtgtgctgctgtctcaccctgggcttctgcacacactgcttctgctcccctgtgtgtgccctcctcatcctccagcctgtgctcaggtatcacctcctccaaggagccttatctgattctgtgtagcttctctctcaagagcacttcccttcctctctccctgctcaccctctggtgtagcagcactcattgttccagttgcttccctgcctcacagataggcttcagtttcattgaggacaggagtcttgtcctgttcagcacccactgcagagcctgtcagagcacaagtgttgggagaaataaatgaattgttacggctcacaggtcccattttctttgctgagactttacagcatgtttccattgcaacatctcttgccccttacacaaaacacagagatgaaagtggcctgtgaattacaaattattgaatagcttttctcatctggttttcagaaagtcaaaaccacaacttaccccagtgtaagattaggctgcaacatcttctgactccagggacaggaaataccttcccttcagccccaccccaccccaggtctttgttagtattactatcctgcccaggtaccttaccgagcgtccacccctcggatgctggctctgggttagatcttccacctacccatggcagatccctgagacagtcctttctagccaggcttcttagcccttcttttaaccattcctaagctttagaaccctttctctacagatgagagccagatttgtggttcaagtaacttgcccaaagatcagatactagctaggaagtgtcagaggccacatgaaaactccactgtctgacaccgggtttgtcctcattgctttggtatccctattaaggagagtattgtatgtttatgtggtttttttaaatacaattttcctctaatcataaaaacacatctgtctttaaattaactaggagcagtattctgcttgaattaccatgtgggtatcttggtttaaagttcatattctctattctctgatcatgagatggaaagggagaaatagacccccaaacagagctcatcttccagctgtaagcacttgcctcaatgcattttgtctaaatagggttcaggacatttttctgtttgtggaacagtaacagtaaattttttttactgcctattattctattctgtataaccttttcttgtagttaacatctaagaaacccagtcctttggaaaatgccataaaataaattaaattttcctgggtactgtggtttctgtctgcagtggcctgctttttggcatttcttctaagctgaatgcttctctaaaatcttagcttatatctgtagccaaagtacctagccctctgctcacccttctgtggcatccgaggtatctttggtgaacattcaaggacgaattaccaaggtgttctctctcttcgtcaacactcacctcccaagcagcgttctgtggtggggcacattaccaccatgttggggaatcagtgtgtgttcacacgacaagaggcgaaaaagaaaaagacaagaattgccaaaacaagcaaatttttcctattctttcctctgtctgagaaatgttcctcaactttccccaacacccgatgcatgatacctgccaaaaaaagctttctccttgctcttcagacacaggctcattgtgagccattctccccggcatccccgcgagtgcaaatttgtgtatgtggtgttttgttttgtatttattttcccagccctttgaaaacagggccttttcctatttaaaataaatttcagaagtgaaatactttttcccttttgagagcccagcccttcctccatacaaaccttcaggcattttcagaggacaatgaaaacttgctctaaaacaccatccatagacttcccttcagtcagtgtttttctcacacattaacaacaaaataacaagtactgtacatccaaccactgtgatccctgaataaacataggcccttgacaagtaattctatttttaagagtcattttttatgtgagtcagttattacaatgggcagttagaatgtgctcctattgtgcacacccatgcacagtaggaatggaactgtaccgcagtcacagagcaagctaggtagttctctgacttccacagcagacatggaggaggactaagaggggaagaaatagtcactcatgtggttttagcaacagtcaaactgcacagcacattttcagttgtctgctgttctattaaatatttttactgtttagacattgtattttttctattcacagccctttacaaatagaagtggatttccctagatctctcataaagcactgtggaaacgtgttttctttttacaaatgtttaaatagctttggttattatttacatttcttcccataatggactcaatcaaaacattttataggcttttatccacacatgtaaagcttgaaagggcaataatgagaaagcaaatgccaataagttgtctggtgaatgtgctgcaatttcaacaaagattattttttcaggaatgggtaatttgtaaaacttgaagttttatactttttaccaaaagtgtgctaaagcaccaatgacaacacaaaatgctttgctttctcaaaaactggggaaacttctctaaccacttattacagtaaatggaaagtaaacaaaatttctaaactttcaagggtaatgtttccacttgttatcatcacctgttatggacatagccagagttgcagtgactgatacttttgtctacttttaatttttacaagaaattaaaattcaaaaaaacgtgatgtacaaatcttccagaaaggttagaattgttttgaccagaggttgtcaaacttcaatttgaaccattacaagacctttcccatgtaagtataaaccttattagaatgatcctgttggcctgctgtgaacatactgcttctttctctcccatctcacccatctgaacccactaccccacacatcagaaagataatttttccatcataaaacaaagttcatattgcctttgttctgcttcaaattacaatgccagttctgatggagcttttatggtgacacaactccagtattacttttgcatctgcttgggcttgttcacatttacaaccagactttcggcatatctgggaactggaaagctcacaacagctctaccaaataccccaggactcttagattcttgaaagatctctgttaccaaatgctactttccaagactttttttctgagatggagtttcactcttgttgcccaggctggagtggtgcaatctcagctcactgtaaccaccacctcccaggttcaggtgattctcctgtctcagcctcttaagtagctgggattacaggcacgtgccaccacgcccagctaatttttgtatttttagtagagacggggtttctccatgttagccaggctggtctcgaactcctgatctcaggttatccacccgccttggcctccaaaagtgctgggattacagacgtgagccaccgtgcctgaccgcaagacttttttttaatgagttgttccagttagctcagagccctgccctctcattagctccatgaagactgatgacttattactacatattccaaagacaggtccccactggggtcaggtagaactggttggcattcctgccccactaggagtaggaggaaaagtaataggaaggaaaatcacttgcccttaaattgatgtggggtgagattaaaaacatttcttttggtgatctgttcggtcacagtatttctaacgatgacaactggatgggaggcctgtagttccattttacccagcagaagagaacagtcctgacccagtgaaagtcatttattccagcatgttgggaacatagtacctggggcactggttttatattgtctgaacggtttagctgccacatagcattgggtaataatgtattggggtgagggctggggcatacagggagacagtgagacccctacaaggctgtactttcctttgacacattccaggtgaagtcttagaaggcagcaacttctcctgtgtttgacagataataataatcaggaaagctctccctaccccccacccccaatataacagtggctgcttctcataggagtaacatacatatttttaatatgtaggatgacaaggtatagtgggaactgtttaccttagcatgtactgtttgtttctcaagaatttcaggtccattacaccttagcaatgaaaagccttctcttatctaggaagtacttgtagcattcaccagcttgtctgttccttttaattttttttttttcctttggccaggacctcccatcataatgcccggattttcaaatttctagtaattgagtttcacattcctaatattaacacccataaggaagctggaaggagaaaatggatactagttatcttaccgactaaatatcagtaagagccctttgattttgaagtgtttgaaggatgagtgaagaggccttgtttaggatagtacactgtggtctaacacattgggaccgtgatttgctacctgaatatcttgggaatttgggggattctaacccaagtgttgattaaaaacaagagagctttcattttcaaattccctaacatgacaccctaattattctaattatttggaataaaagtggataacctacaattgtgaagttttatggttactaaatattttagttaaccacttcagttgttcatgatcaaaataattttatattcattataataccttctataaactgggcaggggaattgactccctttggtacgatagacatttatactgtctctaagtgaatttgccacagattcagagtgaggtgcttatttgtgaagcattaagaatccctgggctgttcccagggagttgagtagaggcatggtgaataactgttcaggtacacctaattgtatagcttgtttatatttgttgttgtaccacaatgcccttattacttagagcataaactccaatcagattcacatttattttaattatttgatcatgaaccacataacctaatgggaaacttggcctgatctgttttgtgaaatgtcttgagaaaattatccatgcctacattaagcaaaaacaaaactaactccacatgatctcacgcataaaaaatgaatgcctggaaaagatgctagttttaagttttaggccaagattgaatttcaattctgggtcatagattaatgtatgtgtccaagtaaatgtgtatatttgtgtgtttgtgtgtgtgtatgtaatgaatgaatagataagtatatacccacaatataagttgctgctaaagaaaataaaagttataagacctgaaaggggacaccaaaaatatgatttccttacaaatattttcaggaattttacttaattgcaaccagaagtctgacctggaagtgtagtgttttgacccccctagctgtctggtttcctatttgcggtgttttttttctcccccaactgtgagaaaatatattttacacagttttaaccctgtgtattcttagaaacactgaaatagaaagtattcctctgcggggaagaaattctcattatttacaagaatgatttgcaaaagcttcacttaaatagaaaatattttttaaaaacttaacaaatccttattagatatatttgaaaataaaacagcttcttggttgcccttcaaggtagtgtgaacttctagaagactgagatttttgtattgtttaagtttacccttattttagtaaaatactagtgttttcataacaaaagtgtacagaatttataaataatgcccttatgatgagggtttttcatgctttccccccttcatttttagcttattcaatctttttttcctctagctttttataaaagtgaaaattaggctgagtaaacttaggaaggctgtagtactatatagtattctaatgaactgaaagataacaataaggcctggcatgatggctcactcttttaatcccaacactttggagaccaaggcagaaggattgcttgagaccagaagttcaagatctacctgggcaacataacaaggttctgtctctacaaaaaaacataaaaataaattagttgggtgtgacagcacgtacctctagtcctagctgctcaggaggctgaggcaggagaatggcttgagcccaggaattcgaggctgccgtgatctatgatcataccactgtactccagctgaggcaacagagaaagaccctgtctctttaatgataataagaaatgaatgaatgacaacaatgaagcttaattaggatgactgtagggccaggaagcctactgttggaaaattatagaattcaccatcaaatactcatagattgatttgctgaatcagtcaaaatgatgagaaacattgtttccatatttccattgtagcctcttgttgtttaccagtgtggtggaataattatatatctcgttttttaaatctcagacattttcacttacaggaaagcctcattcttcctaactatttagttgagagatttaaaaatgaggaacacagttgtcaacaatccatttagctgaagaatacttctcatttttttaataacagctttattgagatataattcatatacaattcacctgtttaaagtatactgttcaatggtttttatgtattcagagttgtgtaaccatcaccagaatcaatttgagaacattttcatcactccaaaagaaaccctttacccattagcagttactcttcattttccccaataccccagccacagacaaccaaccaccagcttactttctgtctctatggatttgcctgttctggacatttcatacaaatagagtcatacaccatgtggttctctgtaactggcttctttcactcagcataatgttttcaagattcgttcattttataacacatatcagtagtactttatttcattttattacaaataatgttccatggtatggatctatcatattttgtccattcatcaattgatggacatttgggttgttaaccacatttggctatgatgaataatgctactatgggtattcgtgtacaagtttttgagtggacatatgttttcatttctcatggctatatacctacgaatggaatttctgggtcattctgtacctgtatgtttaacatattgacgaacttccagactgttttccaagtagctgcagcattttctgttcctgccagcagtgtatgaggcttctattttctccacatccttagccacacctgtttgtctttttgactatagctgtcctgtgtgtatgaagtgttatctcattgtggttttgattccatttccctgatgactaataatgttaccatctattcaagtacttactggccgtttgtatatcttctgtggataaatgtttgttcaggatttgaacccatttttaattgggttattagtctttttattgagttatgggaattcttttaaacattctagatataagtcccttatcagctatatgatttataacatttttcttctcttctgtggattttcttttcattttcttgatggtggcctttgatacccaaaagtttttaattttaatgatgtccaattcatctatgttgttgttgttgtgcttttgatatcatatctaagaaaccattgccctatccaaggtaataaaaatgtacatctattttttaaggagttttatagttttagctcttacattcaggtctttgatgcattttgagttaatttcatatatgacatgagttaggggtccaactttattcttttgcatgtggatatccagttgtccaagtaccttttgttgaaaagactattctatcctcatttaattttcttggcacctttgttgaaaatcagttgacaataaatgtgagtgtttatttctggactctcaattctgtttcttttttttcttttcttttttcttttttttcttttttcagacagagtctctctctgtcgcccaggctggagtgcagtggtgtgatctcggctcgctgcaacctccgcctcccaggttcaaccgattctccacctcagcctcctgagtagctgggattaaggcatccgccaccatgcccagctaatttttgtatttttagtggagatggggtttcaccatgttggccaagctggtctcgaactcctgacctcatgtgatccacccgccttgacctcccaaagtgttgggattacaggcgtgagccaccgtgcctggcctcaattctgtttctacatgtgtttccatatgccaatactgcactgtcttgattactgtagctttatagtaaatttgaaattgtcttctcattcttttaatggaactattttttttttcttcccagcagggtcaaagctggcatttactagttaggatcaagaatcttttttaacctagccagtgcaaacatgattttaaattgttataaatatctgaattttaatgaattaataaagtaccattgattttgccagtggtcttctccagagatttagattaaattaaacctttcacaaatttcttgactctaattgttccattttaaccaaatcaatgaagataaaagttatcctcattatagtcaaggtcttcataggcagaaaaactgtggtgagtcaccagtatttgcaaggtatgactgagggcactcatgggtctttaattctcattcagaatcctttccctcaggttctaaagttgaggccaggttaaaatctaacctcctttgttcacccttccaggcttgtcccccatctctctctattattctatgcattctgaactctaggcgtcagtctaccctaccagggttgccaggagccaaaaggacttgtctgagtttttgcacagatatgaatgcagtgccctccgcttctcagtcccagcagaatgctcctgatgctttaatcctctgcttgaatgtttcccatccttgaggatctccctcctcccaatttggtttgttactcccctttgttaagttagacttacccttttttttttttttttaacattgcagttgcctatgcctacctttgttgcagtagcatttacaatgtaaccatcctacctttaactcctctgtctctccctctgccctcagttgagtccctcaggagcagagcatttttcttgatacccctaggacctcacatagtacttatatgtggtaggtgtgcaagtggcatgagttggatggttccggttcgattattactatttgaggggcacctggtttttgacagaatgaaaaaagcataaccatttcctgttcatactggctcctggaactcctctactgaaatcattttcaagattaagaaagagtaaaatccctttttagtggaatgcctcacatatacagacatatatactccagtttgctgccaaactgccaactcagtaatagctcaccatgaatgtgatatttaatagaaatgattgacaataattccagacaaaggtgtacagcccagacttgtttaacaatgttggccttaatgccatttctaaggaatctttttttttcttctgagccccaaaaaagcctttttccagaaaagctgtgttgaggagagagctgagaaacagtgagacttgctctaatgcatggggaaggggtttgaatgatgcaaacaagcagagtagcagtgtgtccagaagtaggtgctggtggtagagagcagcagcagcctggggaagaccatgggacaagatggagggacagggagctgatagcaggaggtgtgggcagggctgatgttgagaaaatcctgaaaagtagtgatatttggcttcatacagaaccttacaggtggcttcatacagaaccttagatgtgagaaccttggtgggagacatctgccactgagaaaagatgaagacaaacctagcaaaccagtgaaatgcacaagtccaggaagaaaagagagagacagaacgtgcctgagtttgaacaagatgtagtgtattattacccttgattgtgtggatattgctttacaactcagagctttctccaggatcctctttcagagaccccaaagcactgtaaagtatcaagtatttgcaaatgccaggtagaaaagtctcacaccatgcggactttctagtaaaacaaagggagaggccaggtgcagtggctcatgcctgtaatcctaacactttgtgaggccaaggcaggaagatcatttgagagcaggagttcaagaccagcctgggcaacatagtgataccccatctctacaaaaaaaaatttttttttaattagctgagtgtggtggtgtgcacctggagtcctacttgcttgggagactgaggcaggaggatcgcttgagcccagaagtttgatgctgcagtgagctatgatcacgccactgtccaccatcaaagccccctgtaactggaaacatcttcacccgaagtgggatgactgagagctgagtaatgccttgaaaatatttgcatttgtaacagctgaaggacagtgatgaaaagtgattccgtggggtggatctccaggaagctgggaaatgtggcataataaaatgttatgagcttttgtgaggccccagggaatggtgaattctcagtgtgcaacaaaaggaaaaatatctaaataaaaggaaagtgaagttttcatggaatgacagggctgtgtgtactcctgtcagtgagtggggaccaggatcttggagaggtggcagggtgcaggcaggatgcagctttagaccttcccagacacctgatctgacacttctccataggccattagagtgtcagtctgtttgtttcctactcttattttaaattccctctgttcctggtatttccttaatatttccattttgtttgcgttacatatgtaaactgtttttttaaaacctgcattctgtgtttttagcaggaaggtttcctttatctcagctttcagatttccccaattcagctttcagagattagccctgtttagtacaaggtgatatttttattgaatggtgcactttctattccatgcttaacgggttggtaatctggcttgagtctgcaagatgtgtgtgtatgtatctataactatgtatctataaatctatattttcaacttgggccactagtttaaaaatctcagggtgaagttattgttcgtattttacaatagtatgataatttaagcttaaggaagataagagctttacaatcacctattagatcatttttgtttagatttcctttaaattgttatctacttagaaaaattattctaaagattatagttatagttcacaacataataaaagatacttttgccttccttataaaatgttattttcagggttaggaaattacctaaaaaaataagctttaatcatgatttatgttctgagactttggaagagggtctatattaatataaatatttagaagaaaaaaatgtatcatcttgaaaggccctgaatattttcatggtggtgtttcttttttacaaataaatctttaaaagaatactttcattttttaaaacatcagaaatttcaaatacatacaaaaataggatcatataatgaacccccacttatctgttgccagcatcccagttttaaacagcatatagccaatgttatttcatttatatgctcatctattccctgctcccccaactattttaaagtagattctggatgtcatttaattttatatataaatgattcaacatacagagctctaaaagagaagtgatttttaaaatgttaaaaacgccattaaagacaaaaaagtaatgtcatcaactatctagtccatcttcagatttatctgaacgtctcttcagttcctttatagttgagttgttctattcagggtctgaacaaggttggtgtacacattcattgcactcggttgattatctttatcatagaagaacacctcctttaacctgtaggaaccctcatccccaattttttttctatctgtttatttaagaaagcgggtcaaatgtcctctggaatttcccacatttggatttggctggctgcatccggatggtggcattaacctgcctcttccagccccttgtattttctgtggattggtggtttgagccacaggcctgatgaggctggggtcccttgtgtgagaatactttgtggtatgtggggtgtgttttctgttgcatctcatctggcaacacatgatttctggttgtatcccttctaatttcacgctaacaatgtatatacaatgaaaatggagctttttatgattttaaaattaatcagtattttagatttgttcattaggtatttatattactagtaaatactgtttaagcaaaacaaaatttaaaagactcttttacgtaggcttctgaaactttgcttaattcaggcaattaagataaaaatatcaaggtaatgttttgcaataaaacctgggtgttagcatacatagttcctttttaaatctaagtctatgtaagatctaatttagcaccttaattaagatggtaagttattgcatacctatcatcataaggcttacatatcagcccaatatacatcttatgtgaactcttaaggacttgtataatagaagataaaaataaaaagcacatacatggtgggttttttttcccctataaaaacgcaaatcagcaggtagttaaaacaaaaagaaagaaagaaaagaaaacaaagaaggcatgagaccggttcatttaaattccctggaggagtgataataattgagctaatatgcattgccttctcataaattgcttcagtagtttaggccttgagtggcttagaaattagctgtctccccttgcctcttcactgttgctatagaatccagctaaaggcctgtttgtttgtgtttaaagaactaggataacctcttatattcactgacagaacttacattttgtttttgtcttctaagaactctgcaaagcactaccattactctaataagactctcactactaatttcattataacataccagtaaatcaacaaaataagatttagagcagtaacttccagacctgtctgagcatcagaattccctggagctcttttaaaagaatgtagttctctggctctcaccccaggttctctgggcctgggaatccaggaatctgtatggttggaaaagacctcagccttggagattcaaatttcccaagtgatttagatatgggcagtggactcatgattgggaattggaaagaccctagactagtagatagatgcttatttgagcttgatagtggattatttaataactggaagaggaagtagaagagatgataagttttaggaatatttagtgttttcatccatgacttgagtgaatgcatcaaaaatgggtaaaagacctagcaccttataaaatgggatagaaattccaaatgactgtgacaaaattaagaggaatgtctgttacagacaaatgctgaatagaaaatgtagaatagaaaacagactacataaaaagaaaaagcagaaagcaagcaagcatgcaactgggaaacaaaaacagaagtgtgacatgaaagaagaaacacacaatgatctttctttaatttaatgttttcccctgaagctcctgtgttgttttctgcttctcatctttgcaaagttcccagaacagatgtttgtgttttgtgtcctctttcatactctcatttattcttccaccctgaagctacctccgaaatgctaccaatcacctctcaattgccagctgagtattttgttctatttctgctgtcactaatgctctctggcatttgatctttcaactctcttttccaagacttcactatggtggctggccttcttctgatctaactactccatgtgggcccctctttctctgctgactcttgagagtggtcctgcccttgccctttgatctctcacttgacatgctctgccatggacttttcttccttttggccagagttgcttcagtagatctgcagccatgacttttcctctgaactccaacttttccttttccttttcctttcccctttcccctttcctttcctttcctttccttttttttctttctttctttctttctttttttgagacggagtctcactctgtcacccaggctggatggagcgcagtggcatgatcttggctcattgcaacctccgtcacctgggttcaagcaattctcctgcctcagcctccctcctgagtagctgggactacagttgcacaccaccacacccagctaatttttatatttttagtagagacagggtttcaccatattggtcaggctggtctcgaactcctaacctcaggtgatccacctgcctcggcctcccaaaatgctggaattacaggcatgagccaccgtgcccagccactgcacaccttatttctattggctttccaaacagcttcacccagaaatctcattgatcctcatctctaaagcttggtttatcttaccaagcctacctaccctctctataccttaggaagctaccactcatgtagtcaacaaagttaaaaaaaattgtcattgtcatcagtcttctctgaacacgtttcattgacaaccaagcctgtctctgattttcatctctaaagtgtcccttgaatatctctctctcttgttagtcctatggctactgatgatccttgccttctcccacttgactttgttaaaagaaaaactttagacaaaataaatataacagtttatttgagcaaataacaattcatgaatcaggcaacactcaaatccacaagagattctgagagctccgttccagcagtatgggcagggggctttcataggctgaatgtggaggcaaagtaaagaaattacttgattggttatagctaggcatttgccttatttggatatggttcaatagaaagtccctagttaatataacgaatttgctagttggttatctgcgattggctgaagctccattcaaaattaatcagtcacaaggaatgcctctaagttaagttttggtttgcttatttatgtaagggttcctagtacagaaacaaccccagactaatggtttcttgcttattttggcttaacagcttgttaatgataggtatgcagtaatttgtgataaagagggaaaaaaagatgaagagaaatattaggaatagaagtattagtaatgaaaaaaagacgtaattagatcaggaatagaagtattagtaatgaaaaaagacataattaaattaggtggaaattaaaataaaagactattaagaacaacttcgtgccaataaatttgaaaactaaggtgaaatagaaaaattcatagaaaaatataaattgttaatgtgagctaagaataaatataaaccctgaatagattattaaagaatttaaaccactggttaaaaaagaaagcaccaggtctggatattttaccaggacagttcgccccaaaatttaagaactaggtaactccagttttatgtacttgaataaatgttaacatctccaattcattttatgaggttactataacttgacactaaaaactaggatcaaaaaagaaaagaaaaaaacaggacaataaaagagaagaaaattacaggtcaatctcactcaaatataaaagcagaaatcctaaactaaatattagcaagctaaatttggcaatatagaaaacaaaatcatgatatcatacaaagttggctcagcattaaaagtcaatttgtaatatttacaacattaataaattaaaaagagcaatgcatgtaacaattatacaaggtacaggaaaagcaaccagtatttataataaaaatttttagaaaattagaaatatgtctacaaaaagtctacaacaaatgttctcagtagtaagtgaaacattaacagtgttagctttataataaggagcaccagaagatacctaccagcagcagtattcaacactctactggaggagttccagcccaaagaataaaacaggaaaaaaatatacaggtgaaaaaattggagatgaagaaaagtcccttttttggtacatggtatgattgtatatgcagaaaaatctaaaataaatatacatacaaattactcaaattaaaacaaagctatagcaagcaaaacagaatagcactggcgtaaaaatgggccctagaccaacagaacaaaatagagagcccagaaataaactcatgtgtatatggccaaatattctttgacaagagcaccaaaaatgcaaaatggggaaagaatagtctcttcaataaatggttctgggtaaactggatatccaaatgcaaaagaatgaacttggatctttatcttataccatacacaaaaattaaaatatattaaagtcttaaatgtgagacctgaaaccataaaacttctagtagaagaagttgggaaatggctccttgacattggtcctgacaatgatttttttggatgtgaccccaaaagacaggtaacaaaagcaactatatcaaactaaaaacttctgtgcagcaaaggaaacaatcaacaaaatgaaaaggtaacctatagaatggaataaatattttcaagcccatatatctaataagggattaatatccaaaatatataaggaactcatacaactcaatagcaaagaaaaaaaaggaaaaggaagaaagaaaacaactaaattaaataccccaattaaaaatggggaaggacctaagtagatattttcccaaagaaaacatataattgtaaacaggtatatggaaaggtgcttaacgttatttaccatcaggaaatgcacgttatgaccacagtgagatgtcatctcatacctgttagaatggctgttataaaaagagataataagtattggtgaaggtgtggagaaaagggaacccttgcatgcttttgatgggagtgtaaattagtacagccattatggaaaacagtatggagattcttcagaaaagtagaaacagaactaccatatgatccagcagtctcacgtctgggtatatatacaaaggaaatgaaactagcatctttaaaaatgtgctgtatgtatacaatggaacattactcagccataaaaaaagaaggaaatcctactatttgtgtcagcactgatgaacctggagtgcattatgctacatgaagtaagccagacatagacaaatactgtgtgatctcacttgtatgtagaatctaaaaaagcctaattcataaaagcagagagtagaatgatgattgccagaggcaggggtagggacagagtctggctaggggaaggggtcaatgagggaaggaaggggagatttggtcaaaggacacaaactatcagttataaggtgaataagttctggggaatctaatgtacactgtggtgactgtagttaataatcattgcatacttgaaatttggtaagagagatctttaaatgttctcactgcaagaaaaagagagataactatatgaggtgatagttgtattaattagcctgattgtggtaatcatttcacaatagatacatatatcaaatcatcatgttctataccttaaatgtatacaacttttatttatcaattataccccaataaaggtggggaaaaaagatttaataggcatttcagctgacaacatatagaagtcagttacaacagcaggcagtttaaaaatgtagtttttaggagataacatttacatgacaacactaaaaaaactttattggaaggtattaaataagttattaaaaataattaggagatttaccatgtcaaatgtatgggaagtgtcattatcataaagatgtttattttctccaaattgatctataaattcaaggtctttctgatccaaccctgaaagggcttttcatgcaactggacaagctaataaaaggataaaaggccaagaataacttcaagtactcctgatgaagaagaaaaataatgttgggagtcaggaaaggaaattgccctactagattaagatttattataaataaagctcaggtaattaacatagtgttaactgactgatgataagctagtggaataaagtgagtcagaaagagaggtctgtgtatgacagacctggcaaccagggatcagtggggatcttctgttgaatactcaatttattattcatttgggaaagaataaaaacggatttctaaatggtatcatacacaaagtcaatgttcatagtactgaggtttttaaaaatcacgttataaaacaacattcatcatatgatttcgtttttgtagaaagaaataagagtatatgtgattatatattttgagaaaagacctagaagatatcaaaagtcgaaagtgacaaagggtctctgggtggtcggattgttgaagattcatttctctttacacctttttttgtctagatttttaaaaatacattgagtctatgttacttttaattaggaaaaaaattttttttactttgaattttttttaactattcttttagattaaatttagcattatttttcgcagcttccaaactgcctcctccccttacacacataaaaaataacagtttcattgtgatatttgactggaattgtctggtacacaataggcactcggtacatatttgttaaacaaataaatatgggaacaattcacatctttatgatggttagcccttccagttgagaacatggtatattaatctttttaagaccttttcctaattaattatgaaaactttgtaattttttaatgcagatcccacacatttatacaattaatgatttctaaaattatatcatcttttcattttcccccatattgagtcaaacccttgagtatcattttattttattttatttatgtatgtatttatttatttttttaattttatttttagagacagagtcttgctctgtcacccaggctggagtgcagtggcgcgatctcggctcactgcaacctctgcctcccgggttctagcaattctcctgcctcagcctccggagtagctgggattacaggcgcacactgccacacccggctaattttttgtattttagtagagatggggtttcgctgtgttgctcaggctggtctcaaactcttgagcttaggcattccactcgcctcagcctctcaaagtgctagaattacaggcatgagccaccgcacccggctgagtatctttaatgtcagacctaagagtcagaaagatgattttaacgtagaaaaacatgccctgtttagtaaggttaaggacctgggtttatttagcttagaataaatgactaaattgaaactgaatacctatcttcaagcatttggtagtggccagctttcctttagctctgccgaagacacacaaaaaagaaattcaactgaagtgtgaagaatttaagttagagattgcaaactgacaatataaagctacgttggctctcagagacatattatttggaccacacaatatattttaaaagtttgaattgtttgcaaagttaaaatttgaagagatttcacataaaaacttggatttccagcttttctggtacccctgtgccctagtttccgatgagtttgaaaatcactgctgtcccctttaaacaagccctgagctctctccagttttccagtcagaacccaacccttttcctgttacctgtcttacccctcaggcattaagtttgcaatctcagttcatataaaggacagataaagtggcacataggtaggtatagcatcttctcactcagcattttggtgttgtttttaaaagatggttttaatgtggtcctggctgacaaacaggaaatgaactaggagacttccaaggttgtttcttgtcctttgggtccatggtcctgttagaatagtccagtggttcatgaactctctttctcattgcacatgatctagaatctcagagttgaaatggattccctgcaagacagggaggccacagaggatatgcttcatctggtgttcctctgtatgcacaggaaatttgaaatccattgcagaggggcctgcttgaacagctaatagttcaaacaagcagctacctcatttagaaggcttattaaacatctctgtttcttttgtgtatagttatttaaagatgagtgaagggttttaaagagaactttgagttttataagtacacagtattatattattcttatcattatgcatggcctggcagagttatgattgtgggaaccatagttttgaatatcatttcatctatgcttgcgtgttatccaaacacagttttcatatttaatgttaagggcctttttttaaataaacaaaaaagtgggaaagcaacatggggaagaaatctgaagtgatcatttctcaatttgttttattctaatttttgtctgctctgaaaagccttcttattccatgtgaacaatctctgatgggtcccacagaaaatgaaatttgtggcacatgtgccctctggcattacctacaaagtcaaaagggtgacaggcagaaaatgggtgtttttttctaaataaatttggctccgaagaattattttataaataatgattttattcatgaaacatttcatgctccatttgttttggcatcaaatagacatagctttattgtgactcagagtctagtactgtccttatttagggacatgaaatgttatctcaagggaacctttttggaatctctaaatgtcttgggtaataagtgaaatttttagcctaggatcaaatattccacttacccaccaaatttgtttcccagttgtggtcttagactaggatcccgtatgtatattcctaaacttgggacaggactcttggttttcagttcccacagaacaacccctttctccaacccccccccatcaccagcaatagaggaggtcacacttggacccataacatgtttccaaaggccccatcaaggctttttcataggccccatctcatacttagtctcttttcatgtttgaagtgacagcatcaaactcatgatttccctaccctttctaccctaggccttttgataaggacaaggtgcaactttctgagtgacacagtttgggatgtaatgagttacaacttcatttttccttaatgaaatagcttgaaagcacacgtattcttcatcttttttttttttttttttttttttttttttgagatggagtctcactctgttgcccaggccggagtgcagtgccatgatctcggctcactgcaacctctgcctcctgggttcaaacgattctcttgcctcagcctcccaagtaactgggactacaggtgcgtgccaccacgcctggctaatttttttattttagtagagacagggtttcaccatgtgagccaggatggtctcgatctcctgacctcgtgatctgcccaccttggcctcccaaagtgctgggattacaggcgtgagccactgtgcctagcctcttcatcttttaagtatattatatgttcctagtctagtctaatacccaagatactgtcagtactcagttggtatcagcctctttcttcctgttctcttattaaatcacaaccaagcttgagaactgactcatgacttcagactggaaacagtcacatgtctgaactggcgtgcaatgcagagctgcttccgggttagcacatagtaatctgattatgacaaagtgccctttcttaaagcaaatatcagaccactatccaacctacctaagtaagcttatcttcaccaaaattttaactatctacaaatccataattttatttctttgaaattatcattaggaccaaattttcaggtcatctgtatgccagtctttgaattgtcattatagctttagtttgaacctgtaatttcctacagcagttaaaggagaagtcaaaattaataaatggctggcattttaaaagagcatacaggttgaaattttgtgtttaggcaactgaggttaaaaaaaaaagcttagctgggtgcagtggctcacacctgtaatctcagcattttgggaggtccaggcagcaggatcgcttgagcccaggagttcaagactaaccttggcaacatagggggaccatgtctctaaaaataattttaaaacttagatgagtgtggtagcatgcacctgtggtcccagctactcaggaggttgaagtgagagaatcatctgagcccaggaggttgaggctgcagtgaattgtgattgtgccactgcactccagcctgggcaacacagcaagaccctgtcaaaaaaaaaattcaaatgtagaatggggttgttctataacacaactagcctgatctctttaaaagttcagagttctttttttaaaaggtaaagggagattattttagattaaaagagatataagcaaatacatctcttaaaatccatgatctttggttggatccgattcaaaggaaaatcagatcagtgatacacattttgggacaatggagaaatttgaatataggctgattatttgatcggtaatgtcatactcagttgtaataatagtgtcgtggtgatgaaggagaatttccttattgctcaagagctgtgctcacatgtttaggagtaaggtttcatgatgtccacttcgaagcagtttagaaaatatgtgtatgaaatacggcaaaatattaactgttattgaatctagatggtgggttttgggatgttcatgacattatttttctacttttctgaatgtttgaaatgtttcagactgtgtgagtgatgataataatggagtcatctcagggagagaagtactgaggggcatcgtaggtcttcctgagcctgccttgtagtttgggagaaggctttgctggaagagagccacacaggtggtgggtggggtccacaatgaagtggaattcacctgcccggaggtcctgatggctcaccaagccacacagaggcattttcccaggctcgtccatgaatggtctcgtaatagctgtgggagaggacttcccactgttacgcaccagaccacagactcccgttggcagctgtggggaagctcaagtcgccttagctatgaatcccctggaaaacaagtgaggctggatagttttacagtaaaatctctcattgaatatttgctctcagtgtcttgggactgtgaactgtgacaacccaaataaatgaccactcccttaaaaccattactcattggaacatggtactacttgaaactaatctactgccttgctaagccaggatggaatttgttcaattcatatttgagtttttttgtcgtaatttttgcctttctgtttatgaagactgcaaatttctagtagagccattttggagcagcttattttagacagaatatgaaataaaatagtaggaggactgtggtttgtcctttctttctctcatatgcattactgaccacctctccattttttttaaagagactcaatagtttttgatgaacaacttaggtaagccagaagaaagttagtgtggtaacaagtaatcatttgaggcttcatgctttggaggttgtttgtagaaggataaggagaagtgcaacagctttttacgacatacagagagcaaatggtggcacaagaactggagattttttgggctgcttggaggccaggggagaagatgggatcttgctgatactagatgattgtgttacattaagcaattcaaaaatatcaattgtttctggaaatgcacatacctgcagacgcctggtggtaagatgtttctattgcaaagctttttctccctctaatccaaatcccttcttgtgtctaaagacagtcttctcagatttaggagcaccacagtcgccagcaaggaaacaggcatactgaaatgtgatttgcaagtgcctcataatattaataccatcatccagtagttttcagatgaaaagatgatcactttatgatttccatttgctctgctgactcaggttttctgcatttaaaacaccagcatagcgagctgggagctggtgccccaagtaggaaaagcaaaaggacttttggatcctttgccaaattgctgtttagctttagagagtagtggagctttgctttagccctgggtaagtacaaaatctcagtggcctcctgaactctgtgaagttgatttcattaaaagcaaagataagaatgtagtctttatcattgccttttgtctatgaataaatgaaatacatctttctaagcatttcagtgcagtatgtttcaagcagcaataattttctctgtttatagatcaaatttagtttgccataagaactggcatagtaccttttgtgtttaatctctcctcaagtttctctttaaacaaagtttcatatgaccagtcgaatttggattaagcaggtgcaaatcttttttacatgttaaacttgctatttctcttgtaggtgccatttgggcaggttttccattgaaaccactaataacaagatgctatttagaaatgattccttttaacttaattctgtcctggggtgggaggtgtaggggtcaaggtttcaataaactcatttctcctactaatttcagtaacaaatcacttgaaatctgccttatactgctttctttttctataggggaaggtgtcatattgagacttgattgttcagcagtccagataggatttagctgtcactcaagtagtatcttcagataccaggcttcctggactcaaaactgtagctttcatggtcaacttcagattttgccccttcctgataataacgtttttttttaagatggggtcttgctttgtcgcccagcctggagtacagtggtgatcatagctcactgcagccttgaagccctgagctcaagcaatcctcctgcctcagccacctgagcagctgggactacaggcgtgtaccaccatgcccagctaatgtttttttgtattttttttaaggagacggggtctcagtatgtttcccaggctggtctcgagctcctggcctcaagcaatcctcccactttggcccctcaaagtactgaggttacaggcatgagcaccacactgggcctgataataacattttattgctaaagattttgcataggaagaagatttttgaaatttcgaacatgcctcctgaatcttaatcacttagagctatatatcagcaaaggtagaataacagatattatactttttttttctcagttctttggaagacttgcattataaattaatacttgaaaaatacttttaaattttgctgtatgtgtttgtgagtcaccaattgttaaggattccacttcttccctcagcagttggacaaataaacagatgtagaaatgacttccattctctcagtgacctaagaaataacgtatttgttttaaagcactcagagtaatgtcagtggtgtgtatattttgtttgacattttaagcagaagaaagccacatgactgaaatgcaatctattttcaagtgtgttaggaaaaaattattttatctcagcaaatccggagattatcctttcatagatgtcactgttcttgcacaatctgcatgactaaagcaattgttctgtcagagccatcgcttgtttagacagcatcaagtctgtggtcactcatgtcctgggtctttctacaggagtgtcggaaggatactgaatatgaaagtggaaacttctttaattgtattctttatataagttatttcagaccaaccatagtcatggactttggagaatctgatggtcctagagattacttcctgcaactcttggccactccagtttgacagagggggaccctcaccccactctggtggagcttttgcttctgattcttctaccaaataacttgactgctgactgcgataaccaggaacggttttactgtgatttcaggaaaatcatcaacaaagtagtttatacctggagggaagccagaagagaagagaaagggagagaggaaggaattaagctggcactttctgtgaatcatctgaaaatctgttgccaccctatgagacgaatgatagtgtctccattttcacagatggcatttactcttctggatcaggcttctttcatgtaacattatgtttgtgagatgtatttctgttactacctataactgtagctcattcatttttagaggcactatagtatttcagtgtgtgactatatccccattaaaaaatttactgttgatggatatttgcattggttccaggttgagactattgtgaagagtgctattgtgaacactgtatgttcatgcctaagttcagctttagatactcaagcatttttttcaaagtggctgtaccaatttgtactcctgccagcagcgtatgagaattccagttgtcctgcattcttgccaacactttatgctctgtctctttcacttaggccactctggtgagttggagaaattatttttttactcatgtcatatttcttttaatctcattctatatgaagattttgacatacttgaattaatttatttacaggcaaaatacatccatgttcaaataggtatgaactgcttctttttatgagctaataagcagtgagtatgagaaggtggctaagatctattcgcaagctccgactgaattatcccatctgaaagtacgttagacctcatttatttcgttttacagttgaagtaactgagggacttcagggactagggactatgccagcgtcatagtcaggcctcctggaagaggcaagatagtaatgttcacccttgcctctcaagagaagccctctgttaattcctttattctttcatttactaattattattattttagatagagtctcgctctgtcactcaggctggcgtgcagtgatcttagctcactacaacctccacttcccaggttcaagtgattcttctgcctcagcctcctgagtagctgggattacaggtgcccgccacctcacccggctagtttttgtatttttaatagagacagggtttcaccatgttggccaggctggtctcgaactcctgacctcaagtgatccgcctgcctcggcctcccgaattgttgggattacaggcgtgagtcatcacactcagcttcatttgctaaataactattgaatgtgtcttttatggcaggcactgggctgaactccagagatttagcggcaaacaaacttaacttagtgatgttccctttcactttccaggttatggctttcaaatcacagcctatttcctcaagagagggatacgccttcgctgcatcaggagcacacagaatgctggtaagaagccgatttcttggtttgtcagacatttcacacaatctgcttgccctagatagagaagggatgaaaattaaggagtggagagtcccacttgcttcattgccttcatgtcttgagtgtgtccgaaagtttgcgatttctttcctcccaccttgtactgtgtttactgcctctctaagaacagtgagctgggccacatcatgctttcctttcctgatgcatctcagcactttctttgagttttcagagtgactcaacacagttgaactatgaatcacttcagtattgtctgtgcacaccaaagccctggcatatggagcaggtgtgtacacaagaaagctctttcccagccctgagctctcagagctttccctaggtgtgtgatgaggccactttcccccatcacttccccaagtctagatgtccactaaggatatgatttcaaacttgtccagccagcaacagtaaagtcagaagctaatgatcattctccaggttgatctgagcactggaaagaaaatttagttcaccttccatggacaatttcagtatatatataagatatgatataggaactttaaaaaattaacatatagaggcttgctgtggaatcttcatgattatctgcattttcttaactgtaaactctgctcgaatatgttattctcttttttgctgttatttgtttgtttttgagacaagttctcactctgtcactcaggctggagtacagtggtgcaatcatggctcactgcagcctcctaagtagctgggaccacaggtgtgtgccaccatgcctggctttttttttttttgtaatttttggtagagaaggggtctcactatgttgcagctggtctcaaactcctggggtcaagctgtactcccgccttggcctcctaaggtgctgggattacaggcatgagccagcatgcccagccttagatatactgctttcttaacaggtccttccactttgttcaactctctagtaaaataagtcagctaaccttgcacttgtgccctttatggtaaggactatcattgcctaaatatttaattaaatattaaaatagtacaactctcaataatgacctaaacagagcaaaagggtacagaagttgctttctgttaatacctggcagcaccaaaatgtttaaaatctgccattcgaacattgttacttttcagaggaacaaatgcaaataccgaggaattatttgatagaactgataattttgaattccagttctgatccactaatgaactgttgtatttcaattttatgatttttttaggggggggaggtggaaaaataatgaattctgtggctcagtttccctcccataaaatgataaaaaggctatataccatttatcgcaataagatcttttaagaactaatgaataaatattaattgctttgctaattttgttcttctggcttttcaaaatccacctctagtcacctagccagatatcatatgcccacatggggtcaaagttgaaaaaaacccaggcccccacctgaaatgggggctttcctcatgaggaaggctaattgggagtgagaccagaacaacaggttaatccctaatcatggagggctttgaatattgggcactggggagccatggtaggtttttgagcaggatgagtggagctctttttttagaactgttaacctgctgttctgaataggataacttggaatagggagagtgactgccaaggagacagcagtggttgatgggataaggagagagctgttactggaacaacaactcattgggcctcttgggatcatttaagctagtctagtagtgtaaggtgttaacttgtttaaattctgtgtccatgtaattgacaccttcttgcttggcttccaagcggtgcatcaaattgagataccttattacctcagtcattgccatcatgtgcagtgtacctaaaaggctttactcacctgattcataatatccatctttaaaaagaaattggtctcatgtaagagggaagctttctctgttagaaaaatgacttaatttctatcacaaatatcagacatgtatatcataaaaatattcaagcagtacaaccaagtaggaaaaagggagaagagccccctccccacccgcctggaacataccctgttggcatcagcttagcatcactccagacatcatgcctgggtagctggaggctggcgaacaaatggatggatggacagacagatgagaaaaggaaagatccagatgtcattaccatcttgccttcctttcattgaatgccgaggagtccagttcagtgatttattcagtctttcccaatgagaagtcaatggttttgttttaagaagcagcaataatagattactatgagtatggtgtaattttaccatctttattgtatatttaaccattttcttaatagttggatcattaattcctaagaaaagctgctgttttcccagcctgcttcagattagtagtttgccctccagggtcggggagctctctaagactagctaaccaaggagatgataagtaaagtaactaggaaaaacattgataggtcacatttttagattttatctaatattcttcctcttcctctaaagtgttacatgctcattttgaaaacattgatcctattttctaaataggagttctaatcagaaaacagctgactgacacagaggggaggctacagaggttctgcctgggggtttcctgtaatgtaatggtcccggggcgcaggtggaccaatttgcagcctcatcagctctccctagagctttgcgctcaccctgccctattgacggcaaacaccgaaaggatgggaggagagaagagacgtatgttttatatggatgtgcatattgcagtaacttaaaatgaacaaaaatctggaacaaccattctgtgtttatagttttttgacacctttaaacttgtttttcttcattttatacagaactctgtgtattccctgacagatttgtggtttgtgtcagtcagcttgcattcagtcgtgatcttttagcaagtcagaatgaagatttggtgagtatgaaaaaattctataaacaaataagtctgcttaaatgctgagttactgtaaaaaatagaaaacaagaattgtctgctgttgtcattcagctgatgagcacccaacgcatgttttaagggaacaagaagccctacctgttttacgtggtaatatcaactaattcgtgtattgttcttcttttcctcaagaccattttaatcagcagtaccttttccatatcaactgtaaatgagaaagcaacacatcacaaaagctgtgatggtgcttatgatagtgtttaaatgaaataaagaaaagtctttaagtgaaatgaagcaaaatccacatgtttccactggaggctttcattggggtcagtggcttttaaattttattccatggtgaatcaccgacattttcatgagaaccagtacttttccccagtgtattatttcatagctgatagggttcattttctccctctctctctctctctctctctgtctctctgtctctctgtctctctgtctccttctctgtctcccttttctcatgctaagtcttgagttccagcagggcctgcttctgttttattggagttgtctcttcagacaaatagataaaactgactcagaattgcagctgactgctttgtcttttaagctgaacatgtacacttgagaatctccttgttgcacgtgtgtgtgtttcctgcagccacagtccagtctgcctgacttctacacagactttttttcatatttttggacgtatgacttgaatctttaagaaacagggacatatgacttgaatctttaacaaacagaaaaaaaatccaacagacattaaccgggccatgaagtgtgacatgattattatgcttctaaaataatttatgggaatattagattacccttgatgtttattattttttaatccgtatgaaatctgaaatttggcccacatcatctaaaaccagcttcttatctcatcttaaataaatacataagaagagtgtttcagaggctacaagggtgaatagagacccaggaaaagtaaagagcagagaacttatatttaaatttagatgtctgcgtttggtgcagaggaaccctttgcaacagccagtgtggttcatatttcctcttcttcatccatcagtcaaactcttaagaatacacattaaatgaatgaggcaaatttggtgaaaagtattaagtttgtcctttgaaatatttccaggatgttgagttatcttcgtaaactaataaatactaaagtggcaatgccattggcatacatctaaaatataatatagcttaactgattcagagcaaggaagaaattgatctatgggtttaagaaaacaacaattaactgttccagaaagtattattactttcaaatgaaatacaggagaaattagatcttctatctgatatgtaatattaatacttagtatcttaaattattaaggagggattaaaacatctcaatacaaatgaaatattatcccccttaggggccttggtatttatacagatgtaagttttctataccggctgtcatataaatcctataatctggaggacttcctaaacattgagaattttcattctgaaactctcaccggtctaagccttttacatgagtgagttcagtttctttatctttaagatgttctgataaccagtgataacatgaccagagttaaccacattaacttatgaggaaaatgccatttccatcatgaggctcgttccttgttttgagtgattgtctttagttgtggtcagtttctgtctcttcagttgctcatttactccacctctgtctcttcacatatacattttcccagccacatatgtcagctaaagcctggcactactcaacagtttcatctcggggctcaagctctgtgcgtccctctgcctagcctgctcacctctgccacctcccctcctcacaggcctccagcccactacttcctcaggcctgttgttactagaagcaataaaagacccaggtcaagtaaaggtccctctcccacaaatgacccatcaagccaactacaccatccttccaccagaagtgtcttgtagtttaattctcattgatatttgacctctacagagtctgcctgtctcagctatttaaggatcaataaacagcccttcccttccagaactgccttctgcctgagagaaggcattcttatcacttgttccatacttcaaatgcccacagccagtgatgtcaggctcctgtgagtattccctggacttgcttcaagctttgaattcttatatcactttacatggatattcaccaaagggcaggatccatctcattttctctggatagcaattctcaagaacatctgactgggcaaggctgggaaaattggtacccgcagtagctatgttggaaagatttctttggcaataaacttcagttgtttttgtataactattgacttaactcactcttctgcagccacagaagtgacagaggagtgaactagtacttgagcaacagcctgggtgccttactcgtgctgtagccttgagagcacacattccctttccttcatctttttttttggattctcaatgtctaagtgacaatttgttaggaaatctgggagcgtctattcaaaactcctctgtcaagggattctttcaacctgtagacaaggaagccagctgcacttagctccccagtacttaaaggtggttgcacaaaagaactgctgttccagatcaggcagtacaaagggagtaatccccctcctttacggagcagagcgaatgcagccacgctgcccctaagcaccacagcgccagggaggtctgtccctgctgtcactgttgcgtttctcttgtccactcagggactttggtgcagggagatcctctgtgttgcaatagctctgcacagagtgcccatgtgctagggatgtgggaattgtgatgtgtactttgggaagaaaggacattattatgaaatgagtcattgtatttttcttactagagtttctcataagaaatctaaaaactcttgtagcctcagtttttgacctattgctagatataggactggggagtcttttgagagtttttacctttatttggtttgttttttcctcaccgtttttttccttggaaatatgaagaacataaagtgaattttgattgcgctcagctacattccattccaacaatattttcttatttacaaacccaaaagcctatgtagaaactgttttctttctcagatgtaaagtcctggagcctttgggaaatttaaaattatttattatttctttgttaaagttgtgtaaataaccatagaactctgtatatatctgggacatttctgggtcaggacaaagctactatttcattgtgtgttagttacagccactccttctagtctctggagatcagccttcccatctgtttttaccatcacattttaacataatttgctaagtcccagctctatactgggaactctggtaggcaccaggaaaacaaagaaaagtaagaaagtgtgttggccctcaaggagcttacagtttggcagatcaaggctgctgaaggatatcctggtgacctaaaaatgtcattcaaatagggcctccatttttcctaaatatttttccactctgcacctgtatctttaagggttccattggatctcttctgccgttcctcagaaggaaagtccaaaatcccccagccctactttttttacttttaaaccgaagctctcaaagtctgtgatccttttggaaattaaaaaatgatttgtagtgctagtactgcctacaagtggacatatacattaagatatttgagttatctgccttatactctttatttgagttgtggttcaagttgtgaaaatagctgttaagactctgcagacgtaggccagccatacaaggctaggtcctcactgtagcatcatctaagtagaaggattaccgggacatcctgacaagaaacaatattgaagcactaactcagctgcttctcttaaggcacactactgtttagtggtaaagaaatgtccttctagtttttgaatacaaaattgaagtgaaaatgagtttagactcattttcacttcaaataaactattgaaggctgagttatttttagcttggctgttatagtcctcagctgtgcataatccagccctttgtgggccatagccctcctctcattcaagggggagggtatcaaattatctcaaaaatcttttctcacatgggatttctattggaggaagcaaataaaactgtagctaaataaaaactacaaaataattttgcacaaagaagaaattttcttgcagattaaaaaattatgattagaaaaacttccagggtagttatatttgatcttaagaaagatgtaaatagaaattataagctaacattataggccttatgtttttagaacagaagaaataagctaattaacatttgactgtgcactgatgtttgtaccctcatgacagaatcctttaacttttgcataagtataaatcagatcattcaagaaaagaattctctatttttgtgtttagaaaatgaaataagtagtggatgacttttccagatttttcatgatctatcatagagttaaaaaaatttatttttcttatttctaaacaacgctagtggtgaattgcgtggaagatattaacaagagattcctgtagcactagggaaagttccttgagtagagagaggctgttttcatatttcacattttccacaatgttatgaacttagattttacctaataactgatgaccaatattgtacatattcattgtacaaaaaagcttttaatccaaatatatataaagaaaataaaaactagccacaaccctgaacacaaagtctctgctagtgatctggatggtatctcttcatacatcatacttaataaactgaggtccgtgtgtatgtattttaactaggaccctatttgtcagttatgtgtttctgtccattttttttactgatgattttgtatttgacaaactctgctacatgaagacttcttatctagtaaggaaagtaactctcagtgagtttattattttcctttcacttgtatgtcagtgctgtatggtaggatgcattgtttttcctcagaattgtgttttctgtaatgatctctgctttcgatgatgttggtgttatgtttttcaaattagataaacacttgtattttcttctgatacttttatggaatgtattttagtttatgatatgaggtcctttttattccgtgtagtgaccaatattatgctaattatagtctttaggtttaagggacagccgagctgtgtctgcctctgccacaccgtcagtgcacacatgacaatgaggcatctgtagggagcagactctcttttgccccttagcagctggatttcgctgatgacactaagatatttgggttctctgccttatgcttcatttgagctgtggccaaaatagccatcaaggttctgctgacctgcatcagccacacaaggctagtcctcactagcatcatctaagtagaaagattagtgggacatactgccaagagacaatgtttaagcactaaatagaacacttctcttaagtcacactactgtttagtgtgaaagaattctcatggtgcttgccccctcccaaggctgactgccctgtccctttccaatcagttaaggccaaggctcagggtcagaacatgttcaacagatagttaaggaatagattagggccacaccctcagcaagtggcctacgatgggctgttttccttggatagccaccatccccacccaaccttatagggactggcagagagatgaccctctgaaaatgctggtagtgaggatgaagatgtcctctgttggttagtttctctagactaagatggagaaaataagaaaaaaaaaaatctctagggtgagatcattttttaaaagattgtcttttgcttgtatattacagtaacctgagttctcttttgttaataatgaaatttgttctcttttcttaataatgaaatcttcccaaatgtttagccagtatttgtgaaaaacatggtttgtgcctcctcccaccactgccattcctgcaagggaacctgccctttgctgaagtagaataggataggttaaatgaatgaggatcattagataggataagttggaataggatgtatctccatccccaatcctttgtggtttttttctcatagtgtatctttgcctgtgcagaggcccgtgatctccattgatgaaccctttgatagatttgattaggaaaaacgtggtggggaatagaacaactggaaaagggatttgagttaaaatgtaaagacctggctttgaccactgcctctccccttattcactgatgaccttacacaagtcatctggcttcacaagagcactagtcacctaacttgttaagcaaaggtaaacatgatactttctgtacagcgttctcaagttttcctaaagagcaagtgaaataatgaatattaaaatgtcatagaaggccaggcgcggtggctcatgcctgtaatcccagcactttgggaggccgaggcgggcggatcacgaggtcaggagatcgagaccatcctggctaacacagtgaaacaccatctctactaaaaatacaggaaaaaaaaaaaggtagccggatgtggtggcaggcgcctgtagtcccagctactcaggaggctgaggtgggagaatggtgtgaacccaggaggcggagcttgcagtgagccgagattgcaccactgcactccagcctgggtgacagagcaatactctgtctcaaaaaaaaaaaaaaaaaaaaggtcatagaaagtctaaggcacttatacagtattaatttttatcaacatcatttcctttcttctctgaagaagtcttcatttaaatgcaattaacgccacattaacagactgctgtacaatcttctccttcctgcttgaaaggagaaaaatacctgacactatcattctgcttatattattaatattttcccaagaaactcgactccctaattattttctccacttgccagctcaactttattttgcagctataaaaactaaagtaccaaagagttaagtgataaacccccatttagccagccagtcagtgctggagaaagagacacgctaaaggcaaaaacttgtgaccttcagtgggagttctgttaaccaacatccagaggaggaagaggaggaggagaaggagcagcgaccacccagctcaacaccttcgatttccagtagctgccagcagactcacattgagatacggctttggaggaaaaacccagtcacctctctaaagtacgtaggaatcaagagacagcagacttctcaggcttgaattcctaaaagcccatcttcatcagaacacccacagtgatagcacagagagttcattagttagcagatgatttagaattcaatactcattttcccaaggatacagtgtcataacgggatgaggttcccagactagttcacaaaagctgttactatcatgagctctgagtcttggaaagaggaggccttagtatctgtatctcagggaaatggcaagagctattccttccacatccctgggcagaaggccagctcagagcagaattttgaaatgagacaatcatctgtggtgtgttctctctagctcttagacccttttcccatcagtgcccagggctactgtgggctctctcctggttagccctactccctgcgcagctggacttcatgtttacccacctctctccaccatgtccctgttcaggcccacatgctcagtcaggtgagatgttaggaaagacattatccttctttcatcatcccgaaagaggtctgtctaccttcccacaggtgttggcacttttcaaccacaggcctttgtcagagaaggcatttttttttaacaagaagacctcctaaagtggcccaactctgccttggataattcctagtatgttttctctattttttacagatgtttcccttctacttttaaactggagttactagcctatgattcatgaattccttaaaattaaaaaaaaaatgtgtatttttatgtttttttctggtcaaagttaaatagcttctatccaattctcagaacagttgataagcctcacaatgtcaagtgttggcccaaacccataaattcttcaaaatgtccaagtttgtcacacttgtttggcaccagagatttgagcatagaggctaaggttggtcaggatatatttttaggttcttgagggtaggtgaatgtaaactggaaaatccctgtgaaatgtatacttcctgcaaaataacttccttgattattttcaccgatttcatgtttagggtgatactgtttgcagccacttatgggtgcttccccagatctacacaagagcttcactggcatcaattcagaagaaaagaaaacttttaaaaaataattttaaagagaaaatgagagtattcactactaacccaaatgacagcattatcagcagccctggctcacttccccttagagacccgcccttttcatgggaaggcagagaagtgaagtcctcagaggacggactctgggccagacacgtgtggaatgaaggcttgcccctcactgtgggaactgggcagatggcttggccatccagagcatcagtatcctcaagtctgaaatggggaaggtcatgtctgcctcgtgcatgtctcacgtggactcacataccaggtgctagcccctgtgccaagtgttttgcctttggtctcagaacaaatgtccatcatcattgtcatctttagagaaaaacaacttcagtcccagtggaattcatgcgatgccacttttcatttcacctcctgtttgcctcagttcccttgagtcaatacatacatgcttgtgtgtttccatcttttcttttcgttattcattgcgactctgtcccacctgttttgccctttttacttagttattatcaaaaaatttaaaaagtattattagtgaaatttaggaaagagagacttcttcattttaaagacaggtggcttctgcgcagccattttgccttgtggtctgggattgtagtcattgtcattcatgctctgtttgcactgcttttctgtaactaactgaggctttcttatgtgtcatatttcacatcgctgatgctcctgaaaatcatgaggtgtccactaaagtatggttgtaacgttctttttgcctcattacaaattaaaatgttccagtttcatactttaacattattatatgccccccaaataagctgataatatattacacttttaatctgcttttattgttggcagaaggttttaattatttgcagagggctgtcgcatacaataacctattcagtgcaacaaacctgagaagagattgtatcagtcttgaaccttttcattttcacgagacagcaaggccaactcaaagcagcttagccaaaaaaggaaggtttttgtctcatgcccctgaaaagtccaggctttaggtacagcttgatcagagacacaaagaatatcattaagactccatttctcaccatctttggctccagattccactgtgttggcttcactctcagcttatgtgtggtggttggtcccggcagcctcaggtccatatccttccagcagggggaggtgaggcctcttgccaggacagctgtggctgatgcatctctttgaggcttgttagttcagtagtttgattggcctgagccacaggccagtttctggagtcaggtagggaaacaaggtctcttgaaatgcatggacatggatgggggttgaagatgtgattttccaggacaaaatctgagcattgcttccaggaactgaatgagtatccaccatagaggcattattatcatctctctttttatagatgaagaaactggtgctcagagaatatgtcagttgtccaaatatcacagtcaggtagtgaccaagagaggactggagccaaagtgctcttctctttctataagtccatatctaaccatgatggcaaatgatactgtggccattgggcaaagtgaagagagtactactgcacagggagcaggcctcctagactcatttctgcccctgactacatgcacggcctcagtctttgtgggtctcattcttctcatccatcacatagtgacaatacctgccctgatgaatactccttggggaccagatgagatgttgggaaaaggactttgggaatcatatgagttcttcatgaatacaaggcactcttgccttctctccagccccacatggtttgtgaaggcatcacatttgaaaatgtgttcaacactctccagtttccaaagttgcttcctacacctcactgcatttaaatttcccaaacagtcctgtaaggtagatgagaaaccaaccatcaaggggttgagaagctggccctgggacaagccaacaatgaacatgagaccttagactccactccgtttcacctctgtgctgggactcgtgtgccaggagcctcagcctgattcgatcaactctgggtgtatcattctcagcagatgtgattaggaggaatcgagaagcagtaacattttgaatatgccctaagactatgttttgtaatattctactgtgaattgcctacttttcaaaatactctggttgggttactattattattattgagatgcagtttcgctcctgttgcccatgctggagtgcagtggcgtgacctcggctcacctcaacctccgtctcccaggttcaagcgattctcctgcctcctgagtagctgggattacaggcatgcaccaccacgcccggctaattttcgtgtttttagtagtgacaggatttcaccatgttagtcaggctggtctcgaactcctgaccttagctgatccacccgcatgggcctcccaaagtgcggggattacaggcatgagccacaacgcccagccattaattattattatttttttaatcatcatgttttaccttttttatttaatcatatacaaatcttacaaaaatgcttgaagtaatttaacacctgtacatcagtacaaaacctggctgagtaaaatgaagagagaatctattcaagatcattaagaccaaatgtaaactgggaagtatgtggaagatagctgtccagcaagtgtctggaaggtgttctagctgggtagagagcctattctaacagacacgcacatcgcagaaagcggcatgaacagaaccacatcctagataagagtgctgtgtacagaagatccatggaggcaagtgctgtcaggaagggacactgcctccctccaccctcccaactgtcaccaccaagttccttcaggtgagacctcacacaatgtcaagtgctttctaggaaatactaagatcaggttgagagattctgcttggtctagtcaatctgaaaaattcaggctggaaagacaccttttctcaagagttgaattgctttttgccttcaagtcttgcctgcaccttgcttacaatggcatcaatttacacctaaggacctttgaagagaaaaattccattatttcttttttttcttgagagcagattttttccctcctcctttggaagatttgcagtactttgcttccatctgagccagaaaattgtccatttccttttgccaatccttttgtctgctctgaatggctgccttcaggctatccacgccttcatcaagccccaactcctttctgctcatttctgcttctttggcctcttcctgagccctccttttctttgcattcatcttttgtgttgattctttgacaaaggcgttataggatgggacctctccggcgtcaatagcttgctgaatgatattccttatcctgggttcctctgtgtactgcacgcaaagcacagactccatgatctgatccatgtcacccttgaagtccagataggcctgcttaatatcagccagctcttcttccaaacctttgtatgtcttttcaaaagcttgaacgtcctctaaagatatctttttaaagagtagccgccaatacgcctcccagtcttgatcttggatgagcacaggagagtcctcgtccaccgttccctgctcatcgtacactgctctctgttctctgtcaccgagaatggaatagactttttccaggatctggaagcagcgggtggcgtcctccttgtcgccctcgcccacccggtccaggtgtacctgcagggacaccttgtggtagcctcgtcggacctcgccatcggaggcctcgcgttgcacgcccagcacccagtaaagccagccattaattattttcatttggggttgaatgtaacagaatcagaagaaactcatgtacataaccatgagaaaacagatccagctctcaaaagatgaagacagaattcatgaagtcctaccttgagaacaattttaaagacattgaatagctttttttcatccctttattgccttcacatgacgttttacaatcctaaaaacaagagtttggtgggatagcttctgccatatgcttccagtatggctatgaaggatactaggaggatcatatggggtgggccatgtggtcaggatgagctgggattggctggtgcaccccaaggactcttggagtgaccagtaacctgatgacatggccccaaagatctgccgccataaactccaacctcagctaatattaatgtcttagagccttcagccagttgctggagagctggctgcaagtcactcccaacataggccgtgtttgtcagatgggtaggggtgttaccatcccatgttgtgtgtccatgtcacatcaggttctagccagcagcatctgaccctggggcgtggtgttaatatctgcctcaccaagctgtattgagggtgacagtggtgggtgcccccatttctctgttctcccttactgcaaaattcttccaaagtggtgttgtctagacctgtgctggccagtacttgtagccactggccacatttgactatggagtatttaaaatacggcaagtcagaaataatgtaatccaagttgaaagtgcacaccagactttgcagacttagtatataaaacatctgaatattttttacattgatcacgtactataatgattatattttatattatgttaaatatatattattgaaatgtaatttcacctttaaaggtgtccttttacttttttaatgggtctgtagaaaatttcaatttgctcgtacagttcacattctgtttctcctggagagttcagtctccagtctgccttcatactggagaagtgccaatgcagccacttgcacttctcccttgaccccatctcaggtaggcttggatcccagcacttcaccaaaaacagcttatgtcaaagtcaccttccttccagtgatcagttttcactcataaccagtcagcagtgttccatacagttgtcactttcattgacatttcattcttcacttccatgtcactctctcttgcctccaggagcaatatgctatcttgatttttctcctcctcactgatgcttccctcatagtctcttttcctgaatcctcctcatcttctcaacttcttttactcatccaaagtcatttcctagtagagctcatcctgactgactctgaggactttgtgtctgcagctcagacctccctgctttgtgtctacagctcagacctccctctgccggaaacctgtgtcttacctgcctgctcagcacctccatttagatatccaggaggacccttacatcatcttagtccatttgtgttgctataacacaatacccaagactggtaacttataaagaacagaaatttatttcttattgttctcaaggctgggaagtctaagatcaaatcaccagcaggttggggtctggtgagggtctagtccctgcctccaagatgatgtctcattgctgtatgctccggaaaggaggaacagtgtccccacaaagtggaaggacaataggtccaactccttccttcaggcccttttataaaaacacctaatcccattcatgagggtggagccctcatggcctaattacatcttcaaggccccacctcttaataccatcacattggcagcacctgaattttggaggggacacagtcataccatagcaatgcctaaaactgatttcttggtcttattccccaagcctgaccctaaatttactatattttctgtgttggtaaaggccaacttccttcatccagttatttaaaccaaagattgtcgagtcaccaatgacttctctttctcccactctctatatcccgtccatcagcacattgtgttgggtctcccatcaaattatatttccattctaaccactgctccccaaggagcaggctcttctccaagacccatcatctctgaatcaatcaatcattgccgaggcctcatcactagtcttcctccttgtaaccttgtccctctacaacgcccaaggtattccttttaaaatgtcaagtcccaaaaaaaaaaatgaaataaataaataaataaataaataaataaataaataaataaaatgtcaagtcccttttcttctaggaagcttccatgggtatatcatcttcctcacaataaaatatgccatccttacaaaagtcacacaagatctgccttttcaccaccagtacacacacacacccctctttcctgcttcctgacctcttcccctggtttacgctccagtttctgcaccttccaggcatactctgtcctcagacccttggtgttcactcttccccctacccaaaatgctcttccccgtctgcttttgtggcttgtccttcactcaggtctcagtgtaaagcccaccttgttacctaccacagcctttcctgaccaccatatctaacatagcaccccatggccctttagatgtttatttctcctcataacatcataaccacctgacatacgtttatttgtttgtttgttgtcttctccattgagataggggctctgtgaaaccaaggtcctttccctcaagggcctcaagcattgccaggtacagaggtcaatattgcctgattggattactctgtcggattctgctcagttatcaattctgtgtgcctttagggcagaagttcaataattctgctgggtatcagaatcactgaggggcttgcccaaaatatacatgccctgaccccacttcctagagatccaaattctgaggtggaacctagaacatttttaaacacacttcccacatgattttgatgcatgggataaatggaccacactttgcaaaaggctgtctcactgtaccagtttgtgtttgtttatctgctgctctgccttgctgagtgttgttttatgtatatcggcagtttttgaatcacctgggaacctaaatatagatgccctcgccccatcccagatcttgtgaatcagaacttccagggatgggtcttgggaatctccattttcaaaaggctccctctgtgcctctgatgcagccagtcttcccactggcctgcgggagcccctcctgtgctttacagacttcgtgaggaggttggaagctcaagagcaggtgttttctctgccgttttaggccaacttctctccctatctcccattaatccaacagtgttctgttcaaaaccagtttttagtaagtcactgtggggtgactccttggtttatccacagtttcaatgtgcctttgggacttaaacattgcccagtatttattttttctttctttctttccttcttttttctttctttcttttttttttttttttttcaaagcattactctgtcacctaggctggaatgcagtggcacaatcatggcttactgcggccttgacctcctgggctcaagtgatcctcccacctcagcctgctgagtagctgggactataagtgcacaccaccacgcctggctaattttttgtagagatgaggtctcactatgttgcctaggctggtctcgaactcctgagctcaagctatcctcctaccttggcctcccaaagtgctgggattacaagcatgaaccactgcgcctggcccagtatttctaactgcatctcaaatcagcctgttctctgattagaggcaagaaggatatcttaggcacctagctcatcctggtggggactctctttgcagtcctttctatcctggaatttaaaatgtgtttcccaggtcagcccatacaggaatagggtaatatcacccattgtcatactcaaacattcatctgttcagccttccccttggttctgtactgggacatgtgcattgactgtcttcatccttggggtactggtctccagagtacccccaaagatcgagaaaagtcctgatcccttgccttgtggcctgcctaggctgcttaggttgctgagggagggtatctccctagaggccagggctttgccctatttctgtttggttttgccctagaactgtgtactgacattctttatagagagaaacttttgaaccaaaaatcttaaaagtataaccaaaaagtaaaacaaaataggaggtagggtggacatgaggcagatggctggaaatggagtataccaaggaatgatatttgtagaattttattccttggcccaagtgtaagagctaccttccaggttgtaaggaatcatttatgaaggccctggaagatcctgttggttaatctaattttttaatacctgagtctccatggactcagaatgtcccattctggactttggatggccagctctttggtagcctctttgaatatgttgggtttatcttcattctttacaagacatgatgggatcattattcatggcagaatctgaaaagtagtagggttgtcccgtaagcccagaaggcacttgcaaccctcttagcacacattatatatctgcaccttggcgttgtgcctccggataagcctcagattgcattttgatgccagatgtgagaagcctttagtaatcaggatgactccctttaggaaatcctgttcccaggtgatagctgcttcctaaggaatacttgtttgggggcttgggggttgggggggcgggggaggggagcagcaccagaggctctgatttagagacaaaggggagttaattgaccctagaaatgttagagtaagagatttctaatgagacctgacagctcaggggctgaagagggagtctaatcttttttttcctgcccacccagtcttcatacaaatgtaaatatgcctccttcaacaaattgccaaatgtggttttaatttgtaagcgggagaccccgccttgcttttctctttctttttttctttttcttttctttttttttcttttttttttttttttgaaaactaagtcacagattttacactttttgaacaggacatttcctcctgtcactcttatcaccttttctgttgtcctttttcttccaaggacattttcccccattgttgtcagaggaatttgggatgagagccgactgctctgcttcttaaaggagtttttgaagttcccataggaaatgcatagtgctctttaaactgaattttaaaaataaataaataaaggcagtgattgaatttaatacgagatttgaaagagtgtcactatcacagcatcatactttatgtggcatatgcagtattcattgttgttatttatgaccctgtctgccttccattgtggatttcttccagccttggggaatttacatcattcctaatagcaaaaggctttctggttcccacagagttgttcaaagcctgactcatgctccttatgttaattgttcagctctgaaaatacagcacttacagggtgtggctgtgaggggagaatctactgtacttatagggcatgtttagaagtgtttcacacataaatctcgattcctctcgatctctctctttctctcagttgaattttaagctgtcactcattttggccaactagtaagtcttagaaaacaaaaaaaaagggagtataatccaataaaatccaataaaacctagaatattctgttcactagcttaaaactcacttgggttataaccagatatgactttgagtgacactggcccaggtctgagatggataggcacaattgaagagtgtgaagagcccatcctcagtggtgcagggcagtgattaggcaaagcacatcccctcggcttgtaggataaccaggcacggtactcatggctgccacccaccaggtactctggggctgtcactgctaattccagtgtaggtctaaagcaaggacctactgacaacttactaaagctgtttctggtggtagcaacattttattggaatttgatggagaagaatacttagtttctcagaaaatatgaggagttaacaccttgtatggattatctacttgataaccaaaaggagaagagattccaaaagcatgaaatgggttaatgttggcaaggtaggtaggcttttacattttataattacttccttatgatgcttccatgggaacacaaaaggctagataggcagataatctatgaattatataaaaccagagtggtggttagtataaggaaaaaagtcccgaattttttggtagccaagaatcacaaactacagttttcaaaataccaatattaaaagatttgactgttgctatggtcttgggtgtgataaaatattctttttttttttgagacagagtctcgctctgttgcccaggctggagtgcagtggtgccatctcggctcactgcaagctccgcctcccgggttcacgccattctcctgcctcaacctcccaagtagctgggactacaggcatctgccaccacgtcccgctagttttttttgtatttttagtagagacggggtttcaccgtgttagccaggatggtctcgatctcctgacctcgtgatctggctgcctcggcctcccaaagtgctgggattacaggcgtgagccactgcacccggccacaaaatattctttgtttttgcagatagagaaaatatggggaattcttaggatgataagggtgtagaccactgtgtcaccaggtcttgctagaagaacagagctcacaggcacgttgccccacacagtaggattctggggcttttgtcacagcctgagcctcacagataccagatattggccaagagttcccagatggtttggaatcaacattatttgccttacagttttgtatgtttatgacgcatgttaatgtatgaaatgtggactgggagtccaaaagaagttacaattaaccataaagtcctaggtaaaaaaggttaaaatagcttaccactgagcagtttcattcagtctttacaaaaataaatgtgttcattggggcattcagagtgtaactgttttctctcatgttcagctaatagatttctggttgaacctttgttatcttttggagtagacagaaagagttctccatggagtgtctgattactttgctgagtgtgcagagagttcacttcctcccagtgcaaagctccggagaaatgctctgaaagaaatgtaggtgcaatgtgtttcctttttctcatttttgcctgtctctatgtatggatagataacatgaagtccagaattaaacagagtgcctggaactgaagcacaaactcccctccgtcacgtacttactctcccctccctcctgactctcttgctttctggacaatagggatagaatccttgcttcacaggtgtgttgcaaggagtaattaatgacacgttctttgaagatgaaaagcacctgttggtggtgtgtttcataccactttcggagggactacagacagatctagaaaaaaaaaaattcctttcctaggatccttgttccgactttaatataattacgataatcctcatgctcctggtgtcaacagtaagaacatgaatattacatgtatttgttttcacactgaagctagccgaaataaatatttcagctttcaatgttttggtggttgaggaaatttcttgccattcacaaacctgtaaatatatgctgaagttaacatctttagtctctaattctccctgtgcagcttctatcctgcccctcaaagttcactttatcatcagagtgaagttacattgtctgttgtgcacgctgtaaggagcaaggggcttatatacagctatatcgacactcttttgtcttccacgattgtattttattgcctttcatgctgactatctgaaatttcttccaggacatttcaaattatattaactaagtcctactcccatttgttgatcaagtttggtcaacaaacctgataccagctaaatggtggttatatttgggtaacatcttgaaatagcctgagagaaattccagaagatttttctttactcacaagtagaaattgtgtgtatgtgtacatttgtgtacacagagcctgagtctactcctggaaaaaaaaaatcagtatataggcagtactgacccttaacattggaaatgaatacctatttaccttagttaaaatgtgaacgccatcataaatccatttttaacccaatgattgataagcagtatcatgtataatggaatatgtgaaggtttttgcttgattcagtctgcatttaaacatacacctgtggtggggagtgtttccagatttgctggggaagcgagagggcaggtagtgcctgcctcctttttcaggtgtaggaaatgtggtagagggaatctggaggaaacagtgcagtgacagctttacaaaccataaaatcatttttgtttgtttcagtgtgaaaagaactgaaacaaaaagcagtgtcacgagcaaatcgcagaccagaagagacactgtggaaacatctagtgactcagtgattgcagagatagcaaggaggaggaatgatggtcaggcttcctccagtcccccatcagaatccatgggacaagcaaaggattccataaaggcagctgagagccactgggggcttcctgttcaaaagctggaaaaagttaatcagacccagccagaagacactagtggccagcaaaaacctcatcctggggagcggttaaagacagggcttctaagcaggagccccgtctgtagctgtgagtcagcatcaccatgtccaaaacaaagtccacgagtggccaaaacccaacagaaacgcaggaactgcagctctgcggaagacttcgaccaccacgggagagtttctcttggaagtgatcgattagtcccgagagaaataatagtggaaaaaagcaaagctgtcagggttttgccagcttcagagttgtcagatccagggttacttttgaaacaagatttggcaaaaaccacgtctaaggaagagttgcatgttttggaaagtctctcctccagacatcttatgaaaaataacccagggcaggcacagcaaaccggcttagccacaaacactgaaagattatctacaattcagaacagcccaaccaagaaaagaaagaaatacgaaagaggccattaacaccgaagaggtttgtaccgttggagttgaggacatagtggccaaacctgtgacaagagagctgcgaatatagatgccgggattttaaaggaattaattagaatgactaatttaaataggaagtgtgttatctgtgttatggctatggtttgttttcaaagcatttcaaaccgggaggctatatgcttgttctaacagcgttgcttctttatcattgtattttatgactgtcttcagagaattagtaatgacaaagagccatccaccttgtcagggaggagactgtgcaaggactgcatgaagaaactgatcatgagccccttcttggcacatcactgtgcagaccacacaatggaccgtgcaaagacagtgctgccgtgctgcctttcagctccaggggtacaatccatccccctgctcctcagcctgagtaggagggcagtgaaagaacaagctagtggttcttagcgcgtggtcctgggaccagcttcgttgtctggaaatgtgctagaaatgtggttattgggccctgccccatgctgagtaactgcctttgggtgattctgaaacatgctcgcgtttgagaaccactggactaatagaacactccccagtgcttcctgcagcctggttgccatggcctccagctcaccagttggggccagatgtgcacatgcatcccctcggactccctcaaactcgtaaaacacttgggtttggtgtatgggtcactctcttccgggttctacagtatggcagccatggcacccatgaaggtgttactttcccttataattgttgaagtcgatgggcgattctgcccaaccttaggagaagacatcagagaggctcgttgttgcctgtagctcaagcatgtcccagtccctgctcttgcacccacctccaggattttggtttgggacagactataacctaacaggaactcagtgaccaggttccagtttcccagttggaaggcttcgcaggcagttcaaatttcaagatgggagccttccctttacaatgtcacccactgtctccagtgggcttgatgaaatgtcacatagtgaattgtagcaatgacttattttggatggacacccgctaaaagtttccaataaccgaatttcactctaaaagaggaaagaaacaatattcaaggtccattcattcaatacatcttttttttttttctgttcaacatggggtggtcctttgaaatggcacctcccctaagtaataaggaaaaccaagtatattccctaaagtgttgaagttagcagaaaaatcacccagaaaagcccaaaacaatgacaagagtacagaaacaggcatagtgtaggttcatgcttgagatggattagtggtttattccatcccgttctatcctttcccgtatctcctgtccccacttgttaagaccagtaagactcatgaagcagcagctatatttcatggcaccattttgggtcatgaaattccatcttggtcaccaagcctgactgtggtggtagatactgttactttaatgttccaaaccctgcctagaaacctgttcctgtcccatgatcccagcctcaccacccccacttgaaacagcccttcctactggtatcctgtcctcttccctcttggcttttttcctgctcccagcggaacccagtcaggggattctataggagaagagggagcccaacagaatactaacttcagtggagctgactctgcttatacaataggggtgggctgcacagagtggaaaccgagtacctggtagaatgtgcatttccatggcccactgtaggcgcctctcttagagcaaacagtattttaggtgtgctctttattgaacacaggaccacagtgtgtcactgaatcttcttaaacagaagcaattagaacgatttagatatagggagggcacaagtaataagtaacccaggggatagaccaagaagcagctctctggaagagtctggaattaaaaagacggctgtactagaacagtagccactgcctgctccagaactaggggggagatatttgagctggagccaccagagaacatttctattgagaagtttttatttgtttgttctgttggttttttgttatttctgttttcttctaatctttctctgaagtatcactctggtattgagaaatttttatttcattagctaacctgggcttggtggttaaggctagtacttgtacttagaatgattctctgtcaggaaaagtcttggctttagagtttgttatagttggggatataacaattactgtgatcgaagagaaaaaatagcacctttggttgtagatagatgtagttttcctcacagccctcacgtcccttcatgtaaaagggattttaacaggatttacagagggaatggctctcagttcccacactgtgacatgtgtttgaggaattttgcctttaagcatttttcttgcacatggctgaaacacccctggctctcttgttatttgagtggttgcatgattctttggatatttggaagtacaaaggggtaaatggatgccaggggttttttgttgttgttgcttattaggtaggatatgaagagttctcactgttgggaatggtatgtgttttgacattctttttttttttttttttttttttgagacagagtctcgctctgtcgcccaggctggagtgcagtggggcgatcttggctcactgcaagctccgcctcctgggttcacgtcattctcctgtctcagcctcctgagtagctgggactacagacgctcgccaccacgcccggctaattttttgtatttttttttttttttttttttttttagcagaaacgggttttcaccgtgttggccagggtggtctcgatctcctgactcgtgatccgcccgcctcggcctcccaaagtgctgggattacaggtgagagccaccgcacccggcctgttttgacattcttaatgatcttaataatttggcatctgaaagtctgaaacagtgtcagtattgttagtcaaaaagaacaagttcttcaaccacttgcgtagtaccccaaattatattcaagtccctgtgactccaatgcttggagaagtcattgatatgatttgattaatgttataactttgaatttcctaactttctcagcggcatagattctaagccacttccatgtgctttcagatggcatcttaatagattggtgttgaggttattttaatgtccataaacaagaaaggtctgggaacaatctgtatgatttttctttcacattttcttatctttgccactggaggttaactgtcgtccagatatgcatatgaattgtgaaatgcaaagaagcaaacatttgggggtaggggagtaagtgctgtagttcttttgttcacttattttaatactatagaagtgtatttcattttataaaaagcaagaatcataaaaaccctctgtattttgatttatgaagaatatagcttctctctgaagtatctcaagatatatcttggggaccacaatgggatcacagtgtaattgtttgctgttggtgtcatgtttggattttagcatggtttgttatgcatgtcagtggcctctgatttcagaaagagcttggcgagggcagaacacataagggaaggaaacctctgctcaagagagtggcctgggatcacagtgtcgtcattcccaatttccttgaattccttcttggcagaccttactgtaatattacacaaaactgtaatgagtggccctcctttggaggtaacagatgcctttcctaagaactcaaagttctcttttcagcgtgctgtgacttgaatatggaaatcattttaatttcttcttttctcttatggggaaatttccatgcttggtttgtcaagacaagagaattcattccttattattgaaacattaatgaactgaaacacgttgaagcaagtaaaaaatcaaaattaggttggtttatcttaaatagttaaaagccttccttagtacaaaataaattaagcattgtaaaacgaagttaattcaggtaattactcagtacagaaatctaaccgtatatatcattggtattgcaatttaagggtataattaaattctcagaaatctgcaggactcactctaatttgctttctatatttatttacaagacagggaacaaatatgtgtcaatgtgcagcttaacagaggggacttgaatggataaaattatctttaattatctagagctacccagtactgggcttgaatttaatcatagtcaaatgtttcctctggcagcataatattaccatacaccatattaccttataattgccattacagttccttatcaaaaatgttaattctttgcttgagcaaaaatcaataaaaccttatgtttgaccctaaagtatttgatcagggaacagaaggtgtgaattggacagatcccccgaataactttcttcaatcaagttgaaaaaccaaacagctatgtaagtccccaggagagctctttttcccttatcttctcatttgttttgttataaactgtttaaatagttcaaatggttgtgcatgcctaggggatgaaacctatgtaatagaaatgtactgttttatgaataaggagtaaaattgttttaaaaaattaatgtgtatcacttctgttcttcaaaaacaagtgaattaaccccaagaaatgcatattcaaaatgcccttttctggacagctattttaaattatgctctatttgtaagaagtgtttgtgttttctttgttgaaataattctgcagttttgaatactgtgtaaaataatcaaaggagctttccatttaaccatcggccttaaagatttaggtattgaaaacccagcatgaaacatttggattaaattgacccctaagattttggggtgctccttacaatgtggacttgttcccaattctgctgccaactaagagctaagatagacctctttggcaagattaaactatggcactttgactcctttccaaggatcttgacattccccaagtggattcatttccattttccaagtgaatctaatctttactcagaactgatgaagtcctgggctgactgtctacactgccttttatttcagtactgcaggcttctctagttttgtacataacttttcagaagcagtttagtcaggttggaataatacatttgaatagctgtgcgtgcaatgctgagaaccactgcagtcgatgaggcgtagctcatttcttcctagtgttttggtcatggtggcccgctgtctggcctaacccacaggaaagacaccctgccctggacatgggggctgggcctgggatctggggactgcctaacagcatggggctgcaagctgcaatccctgggtccaggctgctgctttgccactagttggtcttatatgttttggtacaagtcatgtaacctcccaggcctcagtttcttcatctgtcaaataaaattatctctaatattttaagtgccaaacacagcttttagtgcatcgggataaacattcccctcccatgtattaatgtctacatctgtttgaaaatggttctctacactggccacctactggggtcacctggatagcttctagttcaatcagaatccctgaggtttggcctgggcgttggtatttttaaagctcatcaaataatgattctcaggagacaccatagttagaactattgtttaaaaatgtggtgtgtgcatgtaaatagcggatgttaaaagagacagggttcgctgagtattctttagaagaggggctttctgcaaatcagaagtgtacctactttcaagtaaatgagtaggcatggctttggggacaaggtgtcagtcaacagtcatacatgttaatcttacaaagagatgtgttttgttttcttctgaaggcccctctgcattggttctgctgctttagaacctacacatcccaacgcacccatcatctttgccaacattgagaaattgttaccctcgttcagaagatgggtctttaaagcacctaaataattgtctgaaatttttacataaacctctggggtttgcctttgatcatgatcattaatatcattaataggctctctctaaaagtgcgtgtgaatctcaagttagcatttggcagggcagtggaagaatgaatgcttttaaaatagtttggctcagaaagtgcatctgaaataaccctgtgggaaaatcaggagaatttctcatcctccaaaggattacctaggatgagatactgaccttgtattttaagttcagttgcatttcttaaaacctcattcattacccagcctgatttattttaggagtgaagtaggctgtgggagggggctatataatgatgtatggtttttatgtttgctttttgttttctgcacagttcccgaaagattttttatcataacgtgtatatatatttctttaaaaaaaaaatccagcttcttcacaagatttactatggcttttctcttagaaattaatgctgaagaattctctcctcttcaggctctaaggcgatcaaaccccagaaggctgagtgtgtgcggggtgagcagagcgctgacctctgccaggggagaggtcagttcagcacacaagactcaaaagggaggaagaaaaagcaactcctcagcagggagtttgacttgctttagggcagaagagcttttataaatgagttcccagtctcccacgccctctcgcctgcacttctgttaccagtcctgttctgcgcttagacacacacacacagacacacacacacacaggcacactcacacctcatttccactcgttgcttcacatccctctctccacctgccccaggaacagtggagagactgacagaccctgctccagaggaggcaggtgatggattgactgggaatttttctaggcccagcagctcccaaggccttttcagttcctccttcacatgcttgactggtgagaagaacgcagaaggctctttcccaaacccacggtgggtgcctggaaagatgaataccagcgcatccattcctattgtcagagggagaggtggaatggtaaatcagggcagcctccagccaggaggtgggagactgggctgggtatttgggatgtgtcccagtaggaggagcctagagggaccttcctgtcacagcacaagagaaggaccttgtgaagcagcaacattgctctattgatatattctccttaaaatgctgccccagtgagccttgtcccagcgcccttctgctcagcatgtgggccatctgcctgtggcagagcctggggcatctagaaaagaatattcttaggtggctctcctgtgaaaatgccccatcaatcaatctgaaggcacttgtaggcagcagagctttctatgccagaggtgtcagggatctgggttgctattggggttcttgttttgatgccaataagcatcttcaccggaaagaaccttctagatgtcaccaaaatctttacacaggctcaaagacaaggagtctctgcatccatctgtgaattttctacagcaaattttccctgttttcccttgaagatagcatttcctggtaccagtttatcaaatctcatgttcttctgggccccagttgtagaaacaactttggctcttgttttgcatgtctgtcaagtctaattccaggtcctaataatgttgttttagaaaagctcactgaacttaagagaaaccttaattttctgctaccagcaatgcaagtctgcctaggccacctgccttgccctccatgcaagggcactcctagcagagagatggtgggagagaaagtttggcttcacatttagccccttctcagtgccaaagaaatggccactgtgcagtgacgacggccaagcagggaacttccttgtagggaaggcctctgaggaagccggaggtgggaatacaaagtatttctgaaatgcccaacccactgaaaacctccagaaaatggaagtcaaaacagtatctcgtttcataaggagagaaaactatctcaagacttgagtgtcctggagtcctccaaggccaggtatctgagcttacctcatttggcacacattttataaaataggggtttggagggatatagaagaaaaaaactgtgttctattctcattattcgcaggctgtagacagctgtcgacactcacagaccacacactgttgtagacttcaattaggcaccaagttttgtacagtcctatagttcattcttgtcttaaatgagcttttctttctcctgcaccggaagccggctctgaattgatcagggaaaaagctaacaacgatttgtatagtcacaaccaaatacgacacctacaagtgacatagctggtacgatcctttttagaagaagcctatgttagttttctatccctgtgtaacaaattaccataaattgagagacttaagacaacataagtttattatctcacagtttttgacacttagctgggtcctctgctgagggtctcaaaggctgaaatcagggcgtcagccaggctgcatcctcatctggatgctcaaccagggaaaggtccacttccaagctcccttgttggcagaattcagttccttacatttgtaggactaagatccgcattgtcccgctggctgttggcaggggacttcctacaagccatttcgcgggtccttgccacatgacctcgtccatttcattaatggagaaaccttggcattgaatcactttcatgctttgaatctctttgacttctccttctgtgactagccagagaaaactctctgcttttaaaaagctcctgtaattaggtcagccctacctggataatctacatttgaaggctaacagatttgagactttaatgacatctgcaaaatcccttcacagcagtaccaggattagcgtttgattgaataaccagggaccagggagctttgggagccatcgtggagtcctgcctacgaccagatccaacagcacttagctcttctctgacaggcccagtttaatggtgtaacggtgagaaagtagactgtcagttggaatctagctgaattccttaatcttttaatggttacttagagcaaatactgaaagcagtgttctttcctttacctgtagcccttttcatgaatattaactatagtggcacacatttattgtcaccatgacagatgaggaaactgaggcacaaagaattttggaaactttcccaagttagtaaatggcagtgcctagaatctgggtctggcaaacctcaaagcccagaaactgtgttgttagagcacacaggtggaaaatttcaaaccaggagctggaaggaagagctgcagttggaatcaaagaagtttcactccagaatgcatgctcttgaccactaagcacacagcctggctttgcacaccaagagggtgaaagtaacagtccagtgaaggaagggtcaggcccacgtggaggctgaatgctctgcaggagatgttcaggacctcttttgtaactgcactgcagccaacactgtccgactgagagctcacaggaagcacggaaatgacagggcgtggaggtggagaaagccagagattgtggtccctcccggccccttcccactccctttactttactagaggcacttttttcttagtttgttgcaaacctgtaggacatgtcacgtttgcgctcttcctttctgctttatgccttgaattctttaaaaattcttctaaagtaacatcactgcaaagccagagagagcccctgagggtatctgattgttcatgtcctgaacttggagggtttatgtttctgtcttggggatggggtttttccaagtcactcagtgtgggtgcctgggcgcagaggaaacttctacatagaatgtacttctggcctaccctgacacgacaaacaggttgtggaggagtagccttttggggatgtcaggtggaggaagcagagctgcccacaggcagttccaggaactctcaggtgtgtctgaactggcccaaccgcacactggacgtggcgaacttcatcacattcaagcgatctggattttagtcctgttaaatgctcaggtgtttttgtggtgataacctggaaggaagctgccagggggagtgggagtggttagagaacgtgggatgaggcctaatgataattgcaatcacctgacactggcgaggaccctggcacctgcatctcagccccggtgagcagcagtgtggttctgaaaacacctgtaaaatgtgcatgtgtgcatatgcgtgcacacacacaggcagcaataagacctagtgaggctgttgatttcctttctgaacctcttttcctgcaactcattttaattctatgaagcaaaaactaaaagggaaatcagaaacttcccaagaacaaaggaacagcctacaaaggagcagggcttaatcttcctttgatgcagaaaacacctattgctcctgggtttatacagatgtcactttctaggcagaaccagttcagattggcgacactgtcgtagcagtcgcttcctgtgacctcccttgagactttgcatccatttttgtgaagtgctgatctcccaaggttttaccttttaaaatcacactaagggcaggatgccggcataaacctcgcaaattcccagaagaggcagaaaacacagcagcccaagaagcaggagcccagagttctagttctggctattgctaactctgtataacttcagacaagtccttgaacctctctgggcctcagtttcctcttctgggaaagtagtgggggttggatcctttgatggataaggtccttgattgcattaacatcctgtgataaaggtgtttcacatgtaacatctatgataaaggtatttcaactgcacatatctcagcaagggtgaactaaaacagcttttcactcttcaggtgcagaacagagggggcgaacctgtttggttgactgagtagtgattaggaagccagctgcaaacttgtatttcccccgaggatcaccgatgagcaccaccagccctgccaagagagcttctctttaaaacaaagctgttactttcatgttgctggcatctgcgtttgctttctggataactcaacccttgggtgccctggtgtggatatttgcagtgcgggtgggttggaaaaggcagcaggcagacctcaattcaaggttcttactggatttaagagcctttattctccaggttaattttcctgacttgcgtatcacaggttaatactggacccaggcataatgatacataatttgagacttgtaaaagctgtcttggacttgaaagaaacacactctaagccaggaaggttgtgcccagcatgcaagagcaagtaatacaggtagaatatatgtccaaagcaagagagccgcacccttttgacatgatctcagaggctgccgggcagggtttaggctcctcggctgccaggcagcgataccacggcggccctacaagcatcactccccccaacctgctcttagttttattttaacagccattggaaggcaatggttcgcaaacggaaattcgttatttttaatagaccccgaaatacctcgtggatttgaagtgatgcaacaagattgccctaatggtttctaaactttgtttttaagacttctggggccagaactgtagagaactgcctcagggcacccttctagctcagataaccaagctgtttgttggcattgctggagactgacataccctgagctgggatgtttagctgcttgtggggtggaaaaaaaatgttaagaaaaataattgttgtttttgcaaactatctatttaaaaacagaacctcaggaagcagatttctgttccaatgcttggatgaatcagagcttacaaagtataaatacacattagcaggaggaggcttcccataacccatgtgcttgttgtatgtcttcccagaccaggaacctctgaactcctgtttctcattcccagtagaggcaagaaagagacccacagtcgaaacggaaatggtggagcattgctcagcccaagtttcaaagcccgaaaggcctgtagaactttttttttcctttaaaggcaactggttttttgctgcacctttgctcactttggagcagacaggtgtaagccatttggaaaggtgggaaacccacgctctggcccattttgctccttgctacctaagaaatattacagaataagttcattttgactcactgacccctcagatcagctaataggcatgaagcacttagaccacatcttgctcaaggggcggtgtaatcattttacttaaaaatgatgtcaggtggcaatttagcaacaaactggcttccaggctatttaattcagtttaacaaggaagaaaaacattataattagttaagagctggtactgtagcactttagcagagttgctcccaatttttagagtgcatgagtcggggaggaagagcgagcttgtcaaaaattcaaattcccaggctccacttctggtgcatctggtctaatagggtcatggaccagtcctggaaatctgcatcttcaaactgtaaaccctctcgcaaatcaccactgagtctcctttggcttttagtcaattaagatacatcctccccctccactttctattcaaattctacatcatggaagtatagaatctcaggacagagcttcccatcctaaaaaaacaccagctttaagtgttctttcctggagtttcatgggatattctaatgctagagttctagttagccaagtttctggactgaaaattttttcttccagggcccctttaaagagagcccagggcgttcctggggaatgaatggtaaaggcactgagtcccttcctctcaactttcctaaccccaggataaccagagcaccattgcctgcttccttcttcctgaaggaaggggaaaatccacccttcacaattaaagtcctggcactgagccacatccagaggaggctgatctatgccctcccaataccaggggtgtcccagacagaaggtgagttaagacaacacccatgaatcccaagatcccttccctcctggaataaagaattgcagagactcattcaacttttttttttttttttcttggcacaaaagcatctggcagctacccaaggaattctggggtcctgcagaatccaagtttacaaaccaccagaacaaggttttgcttcaggatagtgtttgactccactgctgcgaaatgactgtctcctggctagtaggatctagatttctccctccctttgaccccaccttgtggaaacccagctgtctactggcagacattggtgagaaagcggagctacgctagggcagggagatgtcatggaaacctcaactcttcgctgtccgggtccttcaggccacctccccaatgagccaaaacagtgttggccctcttagggttgtcacaatcccaaatccctcgatggcctctgctcatgcacaaggatcccaggacacttaaagctcatctttcattcttaagatgttccttagcacaactccaagcctagaagaaaaaatgtttccccgagaacaaagaaaaacatccccatcagcttttcctccattcaaagtctgctgtgccagttgtatgaaaaccggacgtgggtggacaggcctgaatgttgaagtgctgggggatggctctgagaagggtgagctttggctttcctagccagaagcagagtcctggtgactctgcacggctgctggaagctgtccatgtgcttgttaccacagcttattccttccgcagaggtgccagaggcaaagcttctcccacaccccaccacgcgatgcgggggcagggcctccaccagccacaagtgagagaaccagagttctcctgcccgtgacaggtggggacagcccaactctggaacctcacagaagaccagaacaccagcactccaaggctgcatggtgaggccagaacactcattccctgggaacaaggtgatgagtgatgagcccgaacaccagaagcttgcaactaccacctcctgtgccgtgaggaaaccaccccatgggtaaatgtgcacaagagtcatttcagaccacacccttacaacaggacattaatatgaatctaagtagccagggaaaaaaaagaggcagacattaaatctccctgctcgtttcccaacaccaattccaaaccctttaaaaccctttcagtgctgtggccagttcccctgattgctcacaaacaattcacctcgacactacaggccattaatccagtggtgtttattcaagcagtattcacacttgctgttgaataacaagggaatcaaggctcccctagatggggctcccgcagttccagcttcacagcagccccaggtctttgagaactccagatgagttttgtggttgaaaagcctttcagttcttcctccatccctctgtcaggcagagcctattataccccgattaccagaacagactcagcagggtggcagaagcacatggcaaagccggtagaactacgtaagctcagaagaggccacactgttccatgttttcatacaaaaaaatttaataaatattacttttcaaaatttattgccaagaacaacacatcaaagatgcatttgtatgttcatataacactaataggacaatacaaagtatcttcacggtctcaatggtgaaccaacaagattactctgttttataagcctttttgatcttgaacttcgtaatagcactttgatttcctcacttaaggcaggcagtgtactctatggcaaatctaaacagtgatcttactggacattttatggttcaagtattcaactagcttattagaatactccctaaatgcagtagattaaaaaaaaaaatcaaatctacaagtggttcagtattatgtacgaatggtgaaaagaaatcagaatttacaaagtaagattggtgtgcttccaagttcacacaattaatttgatatttttaatcatattcaaccactcacattttggctatgttaagtcatagctcaacttgttcccttactgctctgcagcagatcacctgcctgtctcttttcaagtctaaagcagaaaaacaaaaaacaaacaaacaaaaaaacctgttctaaactaatcctcaaactgcctcagtcagtccttaaaacgtgttttaagtgatgctatagaaggtgttttaaacatctgacgtcgtacaaaaaaattccatcagtattctgggcacagaagcccatcctattgttttaaaataaactattttcaaacaccttaattttggcttataggcaacaagtaatgagaagagttcaaaaaaataaagccatacgcttacaatgctatcaaaaaccttcaattctaaacacatacatataaataaaaaggaatgatgttttaaggctcttgattattaagttaataaatcaaatatacacagtgattaataaaaaagaattatttacataactatacaaagttctacttttgacatttttttctttaaattcttcattttaccagcaactgctgacatcaaagtctcccctcccccaacaacaaaaatacaattaaaaaaaataaataataaagtcatttgtgatcgttgctgtggttctgagctgcaaaggcactttcaaatacagaactacttgtacgtcatcataaaaccaatatacaaaaacaactcaagagtcaataaatataaataaaactatgatctaagactgcatcaccattaggacatctggcagaagtgggagctcaaagaccagggggctgggcaggctcctgggagcctgatccgagaccgtgtcggctgcaaggggacacacaaccagggtactgttgactagctttttgcatagctgtgagatgcggcactcgatttcccagccaaccacagaaactaccattgccagtgtaagccagcttgtcaaaacttaaattaacacagggattctaagtcagcaacggcctcagactcgagtatgacacgacagtttaaagaactacaagccctcagactctacctagcggcggcagtgcccgcggtctgctatacgatgtactccattcggtttaagctctgggcactttccaagtctctgttgtcctgtttgtttgtccagtttgggtgttttgtcggcgtgccgttggggggcttctcttctctgtctaccagcgtgtacgccggctgcttggcaaaccgggctttctgctggtgtttgtccatgtcgtcctcttctacttcagaattgtgtgtccttattttagacattttggagttcttgttctcataatccttgatggggaccgtgttggccccatgtttctcaatggggtttttgatctggttcagctgctcccgcacgttgttggtggtgttgtcctcagaggctgagtgtgtgtggctgcccggcttccgccgcttccgcaggcaccagtagaaggccgtcaccaagcaacagatccaagccacagttaagacagagctcagcaagggaacaaggaaatctgtaaggcaggcacaaaaccaattaactctccaagaaagaaagaaaaaagcatcatcgcaggaacaaaagaataccaacagtggttctcctgccctttatccctaagaggggggccacagggacaagtcccttttcatcattgcatatggtcacttcacaacttgataagcaaatgctgggatcaggcccctgtagaccttgatactcttatccctggagagactgggtggagcggcagctcctacaggctctttgacttcgcatggggagagcagtgtcttgttaagtctggctactgaggcagctcagtacaggagttggttttcagaactagaaatccgattcaaattagcacagacagctcaaacgtgccatggctccatgcccaatctctcccttggctgaaacggtgctcgagatcctcaggagggaagcctggacacccctgcggggccatcgagcctcacagagctcagcagtggctaggctgtcccaggacaccaaaatgccaagtcaggctttgtacagcttcaaactcaaggacaaaggacaagcagtgtcctagggctttgtcacggatctagcacaatacctgttctgcagggaacgttgcatagtgtgttgggaaggaaaatatgaggcagacctctgttcccatgggccatgtgaccttagtaaagtaggctgccctcagttctcagttaaattgggagctcctgcgagggtagggcactgccagataatccctcgacctgatggctttattgaatagtataatgagatcatctactatcatcacacaaactagtcccacttgacacctacctgttctgttcttcagaggccgcctctgaactcttacttctgcaacggcagcaatcagcgagctgtttccatcacgtttactaacaagatcgattattttgtcagtgatttccttgatcgggttcccatcatcccgtatatcttcagcagactggaaaaacaattgtcagacttgagagtcagaggaatactcaaagcagcctttcttcaaaattactcgacaatctgtgtctgcaaagctttttgtcagtgaatttgctccattcagacactggttaaccgaactgccttgccatcgaataatgaggtgtgaatgggtcttatacttacaatggccacatgtatttcattgttcgctgaaggggaaggctcgcaagcgatgtagattgaatattcagcggaaacattcttcaaaatattcaaattcctcaattcactgcaaatgtgctccgtagtaagaccctaaaacgatttttaaaaacccacacacgtgtaagattgagaggaagaacaaaaggctgagatgttctctttgaggctggctaagttcaagcttactttattataaaacaggaatgtaagctagggagaagtagatcctagctcatggcattcctcctttaaagcaagcaagcagacatccaccattcaaaaaaaaaacaaaggttgttacatactggtgacatcatctccttgttaaaggtaaatgtgatgttcgcacagttatcctggtaataggagtcagaggtgcactttgtcttcaccggctggagactggaagaccgacactcgcccacaccagtgcaggggtggacgaagcactggtcgtccaggatggggatgcagctctgcccgctggggcactcgctgtgccctttgtggagcaggcaaggtcgagggccacaccagacctggagaaaaacagaagctggcagcttagcaggcatgctcatccctgattccagaacacaggtgaactgcggcagccatcatgtcctacctttgagcaggcgatccgtccattcaggcactggcaggtattacagtcatcatcccatttggccccatctggtatcacactccccatggtgatgcaaggtctccctgaaactgacaggtggagacgggtgagcagtttatttttctgtgaaccggatcggggttcaattctttggtccctgttatgaaatggttatgcctgtgccctttgccatgttaagatcattcttcccacagtaacagcatgtgtacttcctgcctttgctggctctgcgcttggccacaagacttgctctggccaatgtaacattggcagatgtgatgtgagcagagcctttgactagcctcttgcacacctacccactggcgatgaaaggaatatgccccagacacagccactggtcgaactgaacccaacccacagcgcaatctctctgcccatgctgcatatcatgagcaataaaaataatgcttgctgcaagccacagcagtttgggatggtttggtacacagttttgtggcaacagctgaccaaaaacaacagctacctgttttggggaagactcttcacgttccctttcccttgtagtcccactgtgtgttcccttccctgagcacagtggcttatttgtgaaaagtcaaatggtgactgcaaagctcgctcaccccagaagacccatgggcagctgaagcctggcacacataccttcctggcacttggcaccactgtgccctggagggcagacacaccggtagccattgatctcatccacacaggtcgctccaaaggcacaaggtgaagactggcattcattgatgtctaggagaaatggagttcaagtttagggactgatggtgtgtggcaatgttttgagattgtttttattgacataacatacaagaaaagcatatcatcataagcttgatgaattttcactcaggtaagcagcatccaaaagaagaaacagatctattgcaaaaacctccaatcactggctcccaaagaccaccaccatcctgagttctaacagtggagaaccattttgggaggcagcaatttttaatttgattcctttgacagtgcaatttacagcaagcctggcaaagtttcctggaaggggtcagacagtaaacatcttaggctttgtggggtatatagtctctgtcacaactatccaactcttgtggtatcatgaaagtagccatagacaatacataaatgaatgtgtggctgtgtgccaagaaaactgtatttataaaaacagacagtgggctggatacggcccctgggccacagtttgccaactgtttatttagaaacatgaaacagatacaacctgcccccatctagtgctgaagactagttaatcccagacttggatttcaagcaccagtaaaatttcagacaatttgggtacaagaatcaaaccataactactctagcaccttttttgttctgtaagagaaagggcttgtaaaaaagtagagaaaaggctcaaaataatatgctttaagcctcttgaaaaactgcgttgcctgcccctattttcctgttttagtcatttctccagggcctgatcagacccagcacagacaagcctctggaagccacagtcgtcctcccttccgtttgtattagctttatcctataccagtgtagctgtggttaacatctgcttgcccataatttcatgttagtcatggggaaatgcacatactttcttcaggaccccactgtagattaatcatcagattctgtgactggcactctctccccaagaacaaggagggctacaccacccagggaactaccagcaggtacctgggaggatccagcctggcatatcttaatcccagctggaggagagagatcctttgctctatgagagctacttaaagggaatggtggctttgtttttaaagatgaaagtcttggggtgaggcatggaatgaagcggtaaagccattgggaaaaccagacggagacagtccttacttattctgcagtcgggcccagcaaaacccggggcacattcgcaccggtaccagttgtctccatccacacaggtgccgctgttgtaactaagaaagcaaagaccaccttggttaccaacctcccagtccattactctggctgccaatcactcacatgtcaccacaccagttacagtcagtggctctcaccccatggccgttgcctggggaattttaaaagaatactgatgcctgggtcccacccccagaaagtctaatttcacaggtcttggttgcagcccaggcagcgggatttttaaaagctcccaggtgattctggtgtgcagccaaggttgaaaaatcactgctctaaatgaggacacaacctggctaattaaagtgtggtccatggggcagcaggatcgcttcacctgggagcttgttagaaaagcagtctgaggccccaccccagacctcctgactcagaacttgcattttaaacacaatccctgggtgattctcacacacacacacacacacacacacacacacacacacacgatagtggatgagtgctggcttaaaaggatgtcacacttaccagggatgagggctgcagtcattggtatctgcaaagaaaagacaacttaatagtgaggacttcaacagggaaagcggtcttagccctaagtaaaaccaccacttattttcctaatacccaaatgataaagtcgtagttaacaccagcaaaatacctttgctaaattggaaccaggcccgcaccacacttagtttcatttgctgtgggacacatgtacacaggaagaggccctggtaggggataggggtgggggtgagaatggaaggagacaggctgctggtcagacccagagctgggaactgagacgccatctgtctccacttatcttattggcgactttctcatgcccaggtcagggctgtatcccatcaagtcattaatgcagacccaggtgatacaaaagcagacatcaaacagctctgcttctggtttccattgcaagtccccaagggtgtcaggatctgctccgacagccctgggagagttcaaggggggaggacactcactctgagcacagatgggcccctcccagccttccttgcagacgcacgtaaaggactcgccgttgaccacacatgtgcccccattatggcaggggttgggcaggcagctactgtttcgggctataaaagaagagcagacacgaccaccctccctgagtatccagaaacagtctggaggggcaagaaccaggcccagagaaatatcataagctccaggggccaaccagcagacacgcccaggtggccatgcccactgcagatcccacgtggggcataaagttacctatgttacaggttgttccttcccagccgccaggacacatgcacttaaaagcatccccctcatcatagcaggtgccaccgttgttgcacgtggcctcatcacactgactgtcacctggaggaaaatatttcagtgtgagtcccagtggccccctcccacagaagacagagggaagggtcccagagatagcatccaaggccaactaccacttacgtgagtggcaggtctttcctttccacccatttttacagtcacagtagaagtcattgaccaggtcgcgacacgtgcccccattgtggcaggggttctggctgcagtcattaatatctagaatcaaaggggagacaatcggctgaagacgagatccaggaccattcacgacaggcgagagccaagcctttcctactgcttacatccaacatcctattctgagaacagccacagtcgtagtactttaacacaatcaggcttttccaggaataaaggagctcccaactgggttactttgaatgccacaagttaggcaagatgtggggtgggcctctggaagtcccatggaaatgaaagtagaaatatgactttccttgcaagcaggaatatttattacacagtctaattctataggtcctcagcagaagctcctccccataagctatcatcaggactcataaatgcaaatgagacacaagtgatactgtcccagtgcagaaatcactgcggtcttgcttccagagatttccagtacaaagaaagttttcccacgttgaagtgggatccctccaacatgacccatacatcccagagctccccaaagagtggcagactcactggtttcacagtaggccccctcccagccgtcactacagatgcacttgtaggagttgacaccatcgatgcaagtgccaccgtttctacaagggttgctctcacagtcattaatatctatgaaacaaagtaaagcaaaaaaagaactgaaggacttgtgaagccatagacaagcactgttcagcagttttcatggctccctcctgacacaatgcacctggcacctccacctgctaccctccatcagggctgtttctcaaattagacaggcggcttatcaagcagaagcttccagagagtgccttacccacttaatgccctcacatgggcatttagtcaccggtactaggtgaaagtggggaagaaactcctacagaaaagaggaatcacccaacctagcaacattccagaatgttccaacatagatatggaggctccgaggcagagtgatctggtaaattgaacacgacctcagtcttagatcccagatgtaaggataagtctcaaccagtctccccagccttactgtttctgattaaaacaatttcaacactgctgggcatggtggctcacacctgtaatcccagcactttgggaggccaagttgggggtcggggggtggatcatctgaggctgggagttcgagaccagcctgaccaacatggggaaaccccatctctactaaaaatacaaaattagctgggcgtggtgggcgtggtgcgcatgcctgtaatcccagctactcaggaaggctgaggcaggcaggagaatcgcttgaacctgggaggccgaggttgtggtgagccgagatcgtgccactgcactctagcctgggcaacaacagcgaaattcggtctcaaaaaaaaaaaaaaaactttcaacaccaatgatcccagggtgggccaggggcagaggcaggggcaggggcaggctggggagcactggtccattcccggatgagggagtcttactttcatggcagtatgttcccgtgaagcctttgttacagtcacaggtgaatttgcctcccgactgactcttgcacttcccgtgaggaccacagacgttggaggaaatataccgcaccccttcaggtgtgtcgttggaagccatggccactgtgcagctgtcaatcactagaagataggcttgggatcagatcacagccatgcacccacagatgcggcattcctaagccaagggcctgggccaagcccactttcctggagacagggaccctctggctaatgagacacaccccagggaagccaagatactggcaacgtgccacatcacattatgacaggcaaagttgagactccaggcaaagagttttaaagcattttctccctccacacaaccaggaaaacccacatgcttgtggatccccttcatcctacctttgacatctacccaatttggtaaacacttgctaaggcaaaaggacctgctttatttacttcctttttgatcttaagcaaggctcaaggacaatcttatagaagctttaaatgttgtgctgcctaatacagcagccaccggccacatgtggctatttacatttaaatgaactaaaatgaaataaaatcagtttctagttacactagtcacagtccacatggcctggggctcccatacctgaccgtgcagatacagaacatccccctctgtctgccgttgcaggaagttctgttgacagtgttgttctcaggcatttgcctcagcgttgcacatcagcccaccccagaacaggaatgctaaatggatttcacattctctcccctgggctacttgtagacacggctctcccactggcaggccggaatagattgtttccacgtgttgcggcccgctacacaggcaggatcatttcactatagaggtcctcctcaccaatacattacttctcaagtgtaacaaggggcagtggtagtaagtggggacaaaaggagcaagtctggagacagccaggtcccgggagaagggaggtaccttcacagggggtcgtgcggcagtggtctttcaggtgtgagcagttcttgccctcatagtcctcggggcacttgcagaaatagtcactggcacggttgtagcactgggcaccgttctggcagggattaggctcacaataatcgatgtccagctgcaaatatcaggaacagcgaaaagggggagggatcagagtaaaacaaaggtgtcacgataacttctctggggcagcaggcactggaatctgacagttccttcggtttctattaggagacaccctgtaagatacatctctatgctgtagggactgccaatgtccagtatttgaaacaacggggcagagtgggagagggagcacaagagggggtggagggaaccaaaaagaacacaaagacgaagacactaagaagaaaataattcgtcagtatctccttccaccagcatttgtctagcagagactctctcatcaataggatgttaatagatgttaggaaattccagacacaagagctgagggaaaagtaaagggaagcggaggaggcagcggctctgctctaaaaacttggccatctgaggttttgccaccactcacctgacagaggtttccagagaaaccagtgggacacagacactggaatctgttgatttcattctgacagtgacccccattcaaacaggggttgctggcacattcatcgatgtctctctcacagtgatcgcctgcatagccaggtggacagatacagcgataaccattaaccaaatcctagaagaggagaaggggagagagagacacatgctttttttctatgtattccacaaacacagggcttcagcggtttagcatgactgttgcggtttagctggttcactgaaatagccaaatgctaaacctctgaaagtggttagaggaatttctatgtgcatgccttcaaaatgactcccacgaggctggggtaacataagccctagcgaaacttccaagagactcttttttcacccaaatttttaaatctcacagggacagagctctcctagtgtcgcacaaatctaaagatttgttgtcaattgtcaaagttttgatttaagcaaagatttacatacccgacaggaggcgtcattctgacactggccaaggcagtcattaatatctaaaaaataaataagtcatcattttaaagaggtaatttacagtgaaattgggcttaattgaaaagccttctcagctcaggatagataagtttcaaatcagatttcctgtgtgctttccgtgagataaggttattacgctgggtggggaccctccctaattcttccagaatgagggagtgaaacttcacatcattgtttcagccacattatcagaatatggctggttttcgcagctaatgagcctgataaagtgtatgttttcactgctgccctgaccactccctctcaaaaaaccattcccactctaaggttttccttctactgctcaagtcctaggactggagccccagtacggaccagcaagtcggctacccaagtttcatgaaaatcaaaatggaaacaaagtcactcacttatgtcacaattctgacccatccagccgggaagacagtcgcagtagtagctggcaatgagattcttacaggatttggcgtttacacaaggtttggcctcacattcatttgcatctgaaaggagatggggatgagcatgagaaatgaagttcaacccccatctcccccaccttggaaaaaaaaagaacaggccagagtttgtctgagacatgagacattttaataagctagctaaataaaagatactagaggttccctctattttaagcatctgatccctctccctagctattatccaataagaaccctaattgataactttccagctgctagttaaccagcccccaacaaaacagcagaaagccaccaggcatttctgtgcaaaacccaggcagcctagttgctgggatttaaatgtggcaaaaagaatgcagacagctcattcctcatgagatcatccccttttggaacccagctgaacactcctcggacagacgattgacatggttcaaggaatcccacgactttcccacagggcctaaaagagctagtccatttgcattcaagttatttctcccaggcctgctagactcttgataataaattacttcttagcatgatggagtgtgaactcacactgccggccacacgctcgtcttctgtaatggctttgacaatcaaagccaaccttggtataaaaattacagtcacagggatgttcttacctaactggcacgttttcccagtccactgtggggggcacacacacttaaatccgttaaccaggtcctggcaggtgcccccgtgggaacagttattaggagaacagtcatcaatgtctggtcaacaagaaaaggagggggttgacaatttaattcaatccatctgacaattagatcctttaacatcacctcttacatgaggggctgtcattgaagagccagacacctgctacaaggaaagctacagcaggacaagtgggacggtgacgataaggccgaagccttgattttagctttaaatcccccactgccccagttcatgtaatccccaacctaagcagtgggggagaaagacagctggatactgacggagcatccgcccaggaggaacacaggacatctctatctgcctaatctttatttttaaagaaaagtttcatcatggctcagaagtagctaagaagtcaggaaaaatagttctttacaggtggaaaaccttattcctctcatttgcttacagagtttgcccaaaatagcacacctagaggctgcattctccacttctgctctgaccagagacaactcctaacaatttatgaagtattcacttttgtgtctttatgacaacctcggagatgggaattgctactgtgccatttaaagagggcccggggagcttctgtggcctgctggagttccgcaagtgacaggtgggggcctaggaccagcacaggcaatctgaccccagaaatccacatccataaccacacctggggtgctgatgacagcggttctcagacctggctgcactgcagaattccagaagtttatcaaagaccatggactccccgattctggagggaatctgggggacccagagatttacactgtaaagcagcccaggtgattctgatatacagccctgtctcacagccaaaggaactctgcaggccaggttcttctctggggccccctggccctatgacagaatccagtagtaagtgacaacctcccctgaaggcagcctctccatggctgcaagaagaataaccacaattggaaggtggccagctccaggaagcagatgcaaaggaacaagcgattccacgaggacgttccttccaagaacagatacatgcgctaccttagtgggacaggatgggggtgctgggagacttccaaacacacaagccaccagactgcttaccagacttaggcctgcacccgcccctctctcaccgagacattcacactggacaagcctaggtacctctccccagcgtggtatcttggcacaaggatccttagaatggacacaggctgaaaattggacttacttgtagagcatgtggggccggtccagcctggggaacactcacactcaaagcccagggaggtctccttacagctgcctctgttgtgacagggatcagagaggcaggcgtgctcagctgcaaaaaccaggatggcagtcagagagggatgcctgcacaccgttacctccccacacccccctccaaccgaatcccacaccacagccactagtgcaagcatatttcaaaaaccaaaagcaagcgtgtgatagaaccctgctgtgtctaggaaagaaaggaagtcatctttctcgctgagctgtctctaaccacattccaagacatctcagagctggggtcatttcatctcccgctgcctcctatacgaatcagcatcacccaaaaaactttagagacttgaaagttacaaaggcttatagaatggttgggataaggcctatctttggaagctattttcacttttttttccttaaacaagtccttaagtatattttttaaaagctgagtacagaaaaattagacaaagggctctcattcatcttggaccacttaccaatttcacagttgggtcctgaatacccctcagggcaggaacactgatatttgtcagggcctgtgttgctacaagttcccccgttgagacacggctgatgagtcccacagtaattgagatctgccaaaaagatcctggagtcactaagagacgcctgtgaagatggcgaacccaccatgtttctagccccagtcgtcttttaaaaagaaaaaccagaaaacccacacagcattcaaggagaattcagaataaaagcccctgccaataaaattagaaaccaaattagtgccatcccacccccagatcccaccctgggtctcatccctaagggccatacctttgtcacagagctggccgccccagttggtctcacagaggcactgccagggctcattacagatgccgtggacgcatcccgggtgtgggatgcacttatcacagtacaggccttgccagccgtactggcacctggagacacacagcacacctccaggttagccttttgaacgttaagagacacctgtacaattcaaatggaagactgcaaagtccaggctttttctgttttgtttctggggacaggaaggtagactcccaaggctcatcaggggctccgtataaacaaacattttcacagttgagctgaggtcccctcccagccgactcctgacaaaaggagggctgtttgggaagaggccagcatggggatgcccttcacaaagccactctcttctcaggctcacacgagtgagccaaaggtgaaggcatggaataaatcaacccgtgcacctagttgcgacagactatagaggaaaggactctctcggtgacaagagagctatgccaaagtctctgcagacgctgcacttgccactctgctctttgtctgcacagaaagtcatgaccccagtgcacagaaatgcaacaagccaccaagtgcagcaggaaactgcctcacgatgacgctttatttaaaaaaacaaggagagaaaggggcaccctcccttggccaaagccagagtaggctctctaaacccacttctatagggaaggagaaggaaatgacaacacttggaaccaactccataatttgtgtcccattactgtgtgctaatttatagtgatttcttgctttgccaagaaaagaaaaaaaaaagaaagcagtctgcttaatttatctagtattggcggagttgaggttcttttatataagcaccttgattaatcatactcttttggggccaaatagtgcctctgatccccaagcaaaaacaaaaacaaatacaacaactttcatctggggtgggagagggggcagcgtctcaaaccactctcccttgaattttcaagccctctgaaactttaattgccttctcaagagccaagctttaacaagggtgggggaaggcagggagaaacatcaactagcctcccggtggagcgtggagggtggagggtggagggtggggtgcgggtgggatgggcaacatgtttccagaacgggacctgggaaaagccacgatcagcgccaaccccctaagctgctcagctgtaactctggaaaacaacccccgccccctctagctccccagaaggaaaggctttcggtttcccaagagcgggaggcaggctagcaaatccttgtcatgggaaaattatagggatctagctaatagctaatcacccacggctgagagtcaacttaacccctgagaatactgactaaccacttcctaacttctgaaaccaagctatgcacacccacatgcaaagaaatcactagaatgtgtggtttaaagttagacactggattctggtttatgtaaaatggaatgtcaacgtgacaagtgactaaaggagtaagataagaacaaaattacaatctaaataatttctcaaaagcggacacccacgttagtgggaggtaagggtgtagccattctgtcaaggctgatattcttagcctgaaagatagtaagagggaactgattacgaaatggcaatattctcaccgtcttcccttattctcttccaaattcaggatcactagccctcttcaagttgcctcataaaggcaaggagaggcagctgaggacccaacctcacctaattaaagagacctcaatccccaagcataaaaaagcaaccacaagaggccatggatgacttcaaaagaaaacaaataaaaatactgaccctaaaagaggcaccaaccaagttatcccagtttaataatatatgattaagattctcatgagaaattgaagtgactttcctcagatgatgattcataattaagtttgatattattggcaggcttgcaataagcaagcatgtatacccagggaaagggactcagtctacttgggaacaacaaaaaccagtaaattttctcatgtgggggtgaaaaaaaaaataacctgtgtaatacataatccaaaagacaacttgcaggtaacttgccattcaactatttctgcagcaggacacaacctgaacttcctcagcgtgaaggttctgttttgactttctttcaaggtagggagggaaaactgggctgggagactatgcaaatgatgtgtgggaaagtcgcaccttaagtaaataaggccatcagtgcgtgtctgggcagggagagggaggtgggacttcgaaagagaaagggctaaattctggaaacaaagcctgttgttctggctgggagggccctcccctgtatagctgtatgtgtgttctgatgacagcagcacaaatcacagtcggcctccgctgatatccatctgagcaggcagcaggcttggaatcactaatagcactgccattgggactttctccagaacacccttaattaggaagagttaaggtaggtggattcctgctccgcattggacagcaatgctgttaaatactacagtccatcgccaccaatgggagacagcaggagaagcccctcagccttccaggaaataaactatctttctgaagtgtaggaagagacaattcgggacaaccagttcttaatttagttccatgttcccccttgcatgggaggggaacagacggagcggtggaatcataaaggtaaaggccacagatagttctctttaaaggagtagcctcaaaatttactaagcagcaaagtcatgtggccagcttgtcaaatgcagactcctgggccaaaccaaggactaggattctatggatgtgggacggagcccacgaacctgcattttaacagctcccttgttaattctggaagttacactttgagtactgaggtctgggggcagtgattgctgatggttccatcagcagcatcgcttgggagcttgttagaaatgcagaaacctgggctcagcccagacctatagaatcaggacctgcgttttaataagagccccaaataacattagtttgggacatactggtttagactatgtttcataagattccctttactcatgtcagagtagctttgggggcaaaagtgacaggctcaaaggatccatttagcgttactccttaaaatttgggaggagggagagcaaagcattaagactgccaaaaacaccacagacaccaacaatatttcccaaaataagccttttccaaacgggcgtaatataaatttcaagaagttccaaaacccgccatcgtgaagtggtcagggcaggcctccctttggcttccgcattgttcctggaccataaaggaacagacttcaaaggactgcagcaaaagtctacattcatcaggctcaactgacaagattccagggcagccattaacctctcagcaccaacccagctcccgcctgcaaaggggccaggagattggactaatcccattctaaagaatgctggactttcgcctattgatgggaaaagtcggggagggggctgggagaagaaagccttggtggaagaggagagagacgcaaagaaacaagcccacatccctccatctagcccatcagcactataagggaagattataaaaatgtgttatcaatttacagaacagttaatacatgaagtcactggctatgcccaaagagtttctttttattccaagagagaagtggtgtgtgcattccaccagacagctggtataatttaataagcttcggatgtgtctatctgaattttttttttaaaaaagctttcttgttctccaaggaaaaaagaggcatagtcacaataaagtcagttcctctcttacataaaggaaaattaaaagaaatctcacaaaagaccagttgatttacctgcagtcacctgggagtttgcaagacccatgcttaggactgcagccttgtcggcaaatagctgtaaaaaacagagaagggcgtgtcagcacactgcctgttccttgcatcgccccggtcatgagaatggcccattgcattaaagtctgcaaattccacgattttaacaggtctcatatcaagtcccttgtaaggagaggaagatgggaggggcccaaataacaaaaccagctttaaacttcaaggccttgttagcagattctgaaaacatgatattgtttggggacaaaatgcagacaagttgacgagggaagggggaccttcgtccagcctctctaaaccacagctaccctggctccttgagcagagcttggtcagtttccattctgcccacacccttttcattagaagaaaaaaaggtatagataatccttccccatcccaccaggacacattcagatgagcctcagcctttaaaaaaaaaaaaaaaaaaaaaaacaacccataccaaatgcctggtttgaaaattccatgggactaacagagccagccaggctggactcattgggcaggctaatctggtggccagatctggtgagacttttataaagtatccttgcagagcaattctctacttcgtttaaaaaaaagaaaaaagtaacttctaaaaaatgtcagtttctaagaccaggcaacagtggcccatgcctataatcccaacactttgggagattgaggcagaaggatagcttgaggccaggagttcgagaccagcctcaacaacatagcaagactatgtctacacaaaataaaaaagctgggtgtggtggcatgtgcctatagtcccagctacttgggaggctgaggcaggaggatcacttgaacccaggagttcaaggctccagtgagccatgattgtgccatcatgggtgacaaagtgagcaccttatcttaaaaaaaaaaaaaaacaccaaacaaaaaacccacactaagtgttaggtcgtttaatttttaaaacacactaaaatatgttaatgaattccccttttcatttgaattccagaaatgccatcctttttaaactcttctctccaattatttaagaaagcagtagtactacccgggagagctgtaaattccttcccccatgacccacccctctctcatggttgaaaaactcactttgaaattgagtctatcaaaacaatttacctaattatcatgtaaaataagcagagtacattattgctcatgaggggatattatacagttaacagaattacccatcaagttgctatgaattggaatcactgaattctataaagggactgggacagtagacagcacagagactaaaagtgggcccactcctacaccaataggaaagcttgagctaaccacatacctctccccatcaaagccatgcccccaaagacacctagtgaaaacttgctgcaaggctaccctgaatgcaggggctatcatttcctataggatagcctgttcagacaacaactgggctgacctagtcctgtctggatctattttgggtcaagttccttagaagcagagtctgagaaggggatctggacataggtagaaggaattgagggaagcagatggggtaggggaaagagctgagcaagaacatggtctcaactggagtctgatttcagcctaatcccagggtaagctctagagtgcaaattgtactactgttttaaggcaaaggaagctgggctttgtagccctatgtctgtcaatcactgactgtgagctggaggaatggggcatgcactggtttggccaaggacgagtctcctgagaaggagcagctgtgagctgttggcagccaacacagcacctgggggatggggatgccagtaaaggggatctggatggggcaccaacagcatcttctacactccgcatcttcatactgcaggcccagaataacagccaaaatcccaccccacctgagatagccgcatgccacctgcctgctggtggggtgataaatggacactaaaagcaacaggcacacgtgcacatgcacacacacacacatacctctgttacattcggggcccatccagccttccatgcaagttttgttgccattctggtcacaggcatagtgtccaaagaagtcatctctggggcggcagaacttattgcagccaaagccatagtagtagtcatcacaggtcacgcggatctgatactcaaagtgggcaacgcccgtgttctgcttcagcgtctgccactgccggctggggttgatcatgcccgagtgagaagccttttcaataatactgtcaggttctagagacaaagtgatgaatcatgttaatattcacattgcagccttcttccctgaccattttggctttttaaaataaaaacatatgcacctgctacaaaattctatctgttgtaaaaaaggcaaagaaatgaaaagtttatgcccctacccagagacaacctgttaccacttgtttaccttctttaatgggtacacagtatttcattgtctggaaacaccaataaataatttacctagtccctgacatgtgtgcatgtgagtcgtttgggcttcttactattaaacaaagccacagtgagcattccttgaacgtatctgcctgtgtatggttcccacaatgagatactctagaaatggaagtgctgaatcagagtccgtgcacaacaaatcaacctctgtccacagtctcaaactaccagtctgtcctcccaccacccaggaagctgtgtttcccaataacactgccaacgttgtacattatcaaaccttctaatctatgcctgataggtaaagaggtatctcatttaattagcatttaactaagtgatggcaagagccctttctggtagttacaaaaccatttatatttgttcctgtgaacagcaacagcttctcttctctgccaacttttctattacattgccatactgacttgcaagtgctctttacatatgagagacagtagctccctatggaatgttgctcttgaagaaatttcattattccagataaaggtcagcaatcatttctggttttagggttttatgtcttgctcagaaaagctttttgtccatttcaaaactcttaactggaagccaaggagacgattaagttacttttttttttttttttttttttttttttacaattgttaacatggcaacctttaaagccagctcttaaataccaagaccttgaacttgatgcattccacctttctcctctgcccagaaggcagatgggagaataattcaccaaagtttagacacaggtaaattgaggggagggtttcttttttctttttgtttttttgagccaagtcatgctcctgaaaaaaaatgcttactgaggataataaacacctcgagctcaagcagctctcaggagtatgtagtccctgccctgaggccacttatcatctagtttgagaagagacaggtacaaaaatagctcaaacatcaggtgccagcagttcaggggagggatctgaaaaggcagcaaggcactaaatcagcaccccaacctggttttgtgtttgttttcttaaacctgccagcaccaactcttcatcaccttgtcaaattcaagaccatcttggagagacagttaggactgacttgcaatgtctttgtgattcttacccacccacatggctgtttttctaggcctcgggccagtgctcctttaaaaagtgatgcaagccctataagtgaccaggagagaagggactcctgggtggcttcatccacacaccgcttccaacagggccccagcgttcgccctctagggctctcaaactgctgcgtgggcaagacaagccttgaacaagctcacatacctgcagcctgacaccccggcacgcactgaaccacttgcaggcaggtaacactttactcgtttttgcaaataaacagaggccaaggaatgacaaaaatgtctctccattaactatgtttgctctgctggttcagttaaaaagcatagtgggctattaccacgcgcttacaagatcttcataaaagggatcggttaaacacactagccatggcttaaaggcatccagcttctgaggctggtatcaacaacaaacagtttagacaagagtccagggcaatcctaggggtgcaggactgatatgtacttttcagtcatgcagtaagctttccacttatttccgggaagtgtcgtgcagaggatcacttcagaatcctcagtggagctatggagctgcatacataatttcacacctgctcagggagggggtcgagcatgtctgggttcaaatacgtctgctgcctgcttcctgatcacgctttccttcagcttggggcactggaaaggaatctgtggcagttcgtttggcagtccagccttgtgactggaaaaggacatcaccatgcctccctgcaatccccagtgccacgaagatgagtcacgaagaagccatgaccgcctcgcaggccaaggaggaggtgatgaagggcgagtctgagcataacctgggaccacaccgacccaaaaacctggaagggggccttagccgagaaagctaagctacagggaaaacctggtctgaagtgtgcctatttatgtttacatgtttattatgcattacagtaaactgaaaccatttgctctaggggagaaagaaatttggaactctatataccacagtcccaaaatgtaataaaagactttggaggaccgatgacagaaggaccagccttaaatactttcaaatacataaacagcacctaggctatatttgggcccgagtctgcctgtgagggctcactgcagagctgatagaaggaattctctgccctaaaactcagggctctgcctttgatttacatctgaagccagaatgtttacaactcgcttgggtcccacagggcagccaactccgtttgggcttctgaacatcctcagcttctgccctgtggagtgcagtccagagggagtggctgagggtgaagaaaggaacaaaacactccaagtagcataaacagcatgtgcaaaggtcctgaggccagaaagcatgtgatgtagttgaggataggaaggcaactgctagggtatggccaggctacagatacgatggacaacacggtgtgtaagacaaggctggcagggagacaaagctgggctgcacagagccttgtgggccacatgaagatctgtcccaagagcaacagaaggccaccaagtggttggtttttcataataagggtgacaagcaaatgttatggctctgaaaagaccaggatggcagaagaatggagaaagcactagaggtgagtcagagcagataaaggtggaccagacgaaggctactctaagttcagtcatgagcagatggtgacttggaccagggcagtggcagaaggcaggcagattcaagtgaagagctggagagatttttcagaacttggaggtggactaggtatggatgctaacagagagggggtacacagatcgccttctatatttctggcttatggcaatgagtgttcaaatatcggtgccagacacccagaaggggccctgggaagggactgcttttggcaagagaagatcctgagtttggttttgactgtgctgaattcaagattccttggaagcatcataaaagaggccaaataggcaagtggagaaaccatttccaccaaacccatctccctcttcagggttcaccaagtgagttttgataacctgcaatgggcacccttgaggtttaaaagaactttattcctacctcagtctttcttgtcctcttccagggatttgattacccccccaggagatgaaacatcctagaaccccaaaatcgggctacctggaaatgcagacaactgtgggtagctctggacaagccctgggttcccaggggacataactccctgacctgcgaggtgacaggaggtccaggaaaggtgctgtgaatgctgcagtgtggcggggaggtctctcacatgtccctaacaagtatactgacctggctcttatcacaggccaggatcaacctcaagctgttcactctaccgggtggattgtttcaatagctaaaagggaggggaaagaacaccatgtcgacaccatactattacagaagagcctatgtctcccccctcctcaaccccttctgcctaacgcttagttaccattgtaagcaggtcacagtgacataatgttcacagtcctcaacgtttgtggcagggaggggagaacaaacaggtgtctatgaccctgactggcatcagccatagccaaggctgacagagcttccctgccacccccacacacacccccccacggcattacagggtagccctctggggaggaagactcgaaccttggactttcatgagctccccctccagggaggatgacatccaaaaagctggacttaagattcccaagctagaagagtgacccaaatggcctgggactctctggcacatcggagctcagcaatgattctgtggctccaagtagcccaataagccagccacaggtggaagctgcccacgtagcaggcaccaagccctcactgcacccacggtgtgcattcaccattttctgtcagcaaaaaaaagcaaggcaaggaaagatgaaaatatattattcacagtgaaagcaaacaaaaaaaaatggtaagatagaaaagcaaaaagtacaaggcattcagagaacagagagccaagacaagaagctggatccactcttcctcatgcacagaccaagagatttcagtgagcatcaagttttccagcgaccgcaacccaaactctgctggcaaaaagggaacttgaagtttcggctcgtgagcgaaaacactgtaaagttacaattaaagagcaagactactttgtaagccagactatgtcatttcaatcacatcctccatggcttatccaccaaaaccaacccctcagtcctgaaaggcaacctgcactgaaaacagagccatctttcagaaagggacaaggcaggtaatggctgtgaagctctggaattgcgcttcaatgaaaggtttgtggagcagtgtgggaaacccggagagactagaagctcacctgcccaccaagtgaaattcaaggtcggtctctagagcccagcaccacctttatggctttatctttctgatgagagattaaacactcacttaaagtttaaatggacttttaaaaagtcactactttgatcctttagcagactacaaggttttaaagttgtaaaaccattaagatctctatcccgaagataatctaggtttcataatcagggaatgagttaactgggattctgttctggccacttaatattccaagcaaaaatcctagaaaagttaaggaatacattccactgaaggttcaccctggggtacaggggagaacagaaggcaagaggtggcagaaatgctaagtactaaggagacagatccagctccaactggttggccaagccccacacttccacgtgtgtttagagaaaagtccacagaagcgatacttacgaacggtgtcattactggaatcccacgcctccacaagcaacgtataggacctctgcaagacaaacaaacaatttagcaattcagaaacagggtcgactttccaaaatctcgtacattcttggcctcccagaataccccaccaaacaaaaccataatgccaaaataaaaattctgttggttgttgcattgagttcctggatgtttaaatccaaaccaactccccttcctttgtcagcactcttcccaggttgacaaatgactcctttcacctggcagggacgcactggagtcaacatgcatgcaggcagctcaaagttgagatcaggaaatgccacctcactatatgatatgagagtatttagcatatagtttcccaaaactttccagaccctgaccctagtgcatgaggaaacacacacacacacacacacacacacacacacacacacaaagaatttattctaagctaacctaaccaggtatttgtaccgagggggtattgctaaggttacactttgggccctggtgaggcagtctctagggaggcccccttttcctttttagaacccctttgaaaactctgtctatgtgagaccatcctggctcccacaagtatcgggtaactctaggaaacaggagggggtagatgcaaagtgactctgcaagacaaagaagtcaacctcacttgggcggtggagttgggggcagatcccagggaagaaagtacaaagggagaaacaaccgcacacccatgggttatatttattgatgaacttatctgttaataagatctaacattccaagaataatcagagtctactaactaaacaaattccctggatactggcaagatgccagctgttaaactgaaggcaccttttatcttccaagcttatctcagaattccacctccccacccccagccaaacctaagctattagcaaattccctccttttctaaaattttccttcgtaatttacagtaaggtcagtctcacaaaacaccagcgtttaaatgaagcttctgctatcttggcactgaagaaatgtactcaaggcaggtggggtagacaaggaacatgaactaggttatgaatccctgctttgctgtgtcagaaaccaagccataggaaatagaagcgtgtatagattaaataataccgtgctgtgccaccagaagcacactgctgccaagagaagagaaagcacctataagataaaggaaaaagagaaaaagggagggtaaaagggagtttcattcataactcaaggccagcttagcgctctcagagtgacacagcaggtcatctctgaatataaaaatatcttgtgatagaccctgccttggaattcagccgaaatatgtttcatactcaaagcagagtaggattccatttcgttcactgataactgtgggaaaatgctcagaaaagcaagcaaaaccgggcaagccagggcacatacccagccctctcctgttagtggccacaggtccaaattcattgctgttgttactattttattagcgaaagttataccttatttactgcctctttaagtttcttaggacttcctgcaaattacaggactcttccctaagagcagcaagaaattatatttctctactgatttgaggtaagagcacagtcaaaatgaggccagatgtgtggctgattctgtataattaagcccttcatttgctggtcacgttgaggcccacgtcctccacttcaacagtattgttgtaattaatcctctgattaaatgcattgataccaggagttttgacagacttgcacaagcgctaaacacataatacccacaaaccccactgcaagggaaggtgccgggactgagctggcatggcagtactaactcagtttaatactcaaagaggaaagcatccttaggtcttgcacaagaacttggacgaccaagcagtctaccaggctcatcctcgccagaactgggaaaacctcagaagttgctgaccgacatcaccccacctggagagaaaagaattgcacacagccctacgtgcctggctctgtgattttccatgaactgcccttctttctcagaggcagagacagggtgagggcagggagctacagtgacggcaacaaagcctggactttttttcctgtctgtttcagggaggggattagggtctcctggggcaggaggattcctcctgcccagccctacagagaaaaaggattccctccaaggttcctattaggaggcactcaacctcccactccatccccacactatagatcagcaatcaagataatttaacaatgattattagttgctagagaactttaatttttcccaggcccacacttgacctctgtacatccctgaacatacacccaggcactgagatcccagatcatgcaccccacatcaaagcagggaccaggccacagagcagcaaatccactatgccgaagtcacatacaagcagccactgcaactctgacccccagtagaggcggagtcctccatcccaggagggcttggaaaggcaagtgttcaaacttaagtttatacagcaaaacaacaacaacaaaagcaaatacctgggtttttcttgatttcagactacagaactaagactctgccgaagagtcacctggctttcatctttccttatgttttccagaacagtactgtgaaggccacacaggaaggaggggtagcaaacagatctttagtctggatttgcaaagtgagtcacttcagccccttcccagctccaagcccaaggaaatctggaaacctggcagctggttcccattctggtgtggcatcaaagaggaatggtcagccttcggaattgctttttggaagatttctgtggaattctacctagaggagagtcctggcatcaaagccccaaggcatccaagggccaccaggttcccagcaaggctggggcccctgcacctcctcccgccctccacacttaggctgctgtgccaaggttgtgttctctgccctgtcccactccatggcggttaccttggcactgggcagagcggtaagcacttaattgccacattaagaaggggggatgtaagaaacaaaggtaattgtgttggcagccgggagcttccttttcctggcaacagtgacagccaaaccaagccctgagaagcggctgcctcccctcctgccaagctgacggacacaaataaaccgccatccaaacggcacgcgtgcggcgtccaaaaccccaggctgctgcgacaggcaggcccgccggcggcacgcacatcctgggaatgcccgacgtgccaacgcggccattgtgcacagtcagtcggctcccagggttcgtcaggggccctgagctctgctgactcaactgttgcttcctgtcgcttgtcctgtgttagcattatttttggagaggccctattattctccataatcctcatttcagtcaattcggccaactctattgtcctgcctgtgtctgggtggccagagtataaaatattccagtcacaaaacatattaagcagaaaaggttgcagggagtccatgtgtggcgcatgcacacgtactcatgcacacaatgcgagtgggttttgggaaagtgagataagaaaggacaactatcctatagcatctaggctaagacttcaggcacagaaagcaatcaagtctgtagggcttgacatgtcaatagagtccgatctggttacaaagggtgattttctcatcaaagcccactcaaaggctcaccaaggggccccaaagctcatatccagatttgtgactctcaatgagacatccccaccccctttcccatcattacccttacctgtttgaaaagcatcccactgataattaaatgcaccagttacaaaagggtggcgaggttaatagatagaataccaagaagccagccaagcacaacggtctggttcacacagagcaagcctgaacaagaagcctttctgtttatttaccaaaagtgcataaaaactgggttgagctggtagaggactctgcatgtttgactatttatgtactcctttaactactgggagccaccttgcggaatttcttcccagcacacgcactgcaccaatggtagatgtcactggcaccataaaaaaaaaaaaaaaaaaaaaaaacagcagtcacagggctgctgtggtccatgcggtaatcagaaatcagcaaagaagtcacaacacagccacccagtgccatgcaccaaagtaaaggtgggatttttctgaacccaggaccctcctccatttccaccaccattttagaatcaccactttccattcatcccaatgtatcttccaacagttggaagaaaagattaagttttgagagatatatatatatttaaaagctgaagccaagagtcacttctctcagcagcctagatcctaggcttgaaggatgggggtaggtggaagagcaacatgccttacagaagtttaccatggaagaatttgcaggagtatttgcatttatggattacaacgctaattgtatgcacatccagagatcatgcattcttacattgtcactaaccttgaaagccggacattgggaccaacttctggcccttctacaatggggccagtgggtgatatgaatccagccaaggcctctggttcacattcctgttttcagatcaggaactgtgaaggctccttgttaccttgacactgtttttttttttttaagtaacttttttctccatgctaaactttccacgtcttctatctaaaaggtccccaaaggcaccactatttggtgtgaagattttgagcagcacttagattgctgattttctgggaggttgcatgcctgtaagttgctgctgactctccttttaacccactgaactcccccaagagcctccacgccaaagtttcaccgttttctaaaaacatcttaagtccctgtagaattacgggtgtggaactggtgggttgcaaattcctataagtactggaggtttgaataagttgctaagaaacaagacaacaaggagaaagaaaacacagaaggttacacctgcaagagaaaaaaaaattagaaaccaagtacctggaataaagattccatttttggagcagctattctgcagatacttagcacagctctttcaaagcaagcacagcttcactttcccccaagcccagtgttgcaacacagatacatcacttcatccctttggtttgaggtagacttcttagggcaaaaggcgttttctccacatgcagaaagtcccttgctctgagcacatacgtacacacatgctctttctttgtatacatgctgactacacgggcaggatgcaaatcctggctgcagaaaggaggcaggtcaaatcagaaccccatccttaagccctccatgtgcccacaccatatctacagaagctcagggactggaaaagacagcaaaaggcataaaagtaagggcctgtcaattacattctgtgattagcatcgtggcaattggtcattcaggcctgaagcatgaagggggccaaagctggcatccctcacacagaagaatcacgtttcattggattttccaaaaaaaaaaaaaaaaaaaaaaaaaaaaaaaaaaaaaaaaagttgatctcagcaagtcttttaataggatcaatggaatttaaatatgaggctaataagccagataccccaatttcttcccctaacgtttctctagattcatttcactctggggccaccgatgcagcaatacagctaactggggttctgaagttcccaaaaagcttttggagatgagtagtggtaattacactaatgtatttttaataagcaggcactactgggatttagcactaattttgggaggtacagattaaccgtttcagtgatttataagtggtaattcctaaattatttcctgttaagcccaattacttcccacaataatggttcttatcacttggtcccccaatttgagaatcattaatccagatagttgctgcaagttaagccccttagagcagcaacagtatgagaattagaagccagtggtgaaaaactaccccaagaccagagccggggcaggggacaccacgtgggacatactcagatatgatatatgacaggaagggccacctctacaaagcctttcacatgcacaccagaacatggactgtatttcatatctgaccaaatcgtttcctcctcgtcctctctagaacatgaacagttgcttggataggggtcataattccaaacaaaaagcatgaactacatgaccttctacactgacctacccctgcaccctttgctgatacccagcgtcagcaaatttgggaggactcatgcaaatggtaattgtgcctgctaggggttgggagcccaaggtggtttggagttttgttttgtttttaaccatatatccttttcttgctatctcttgaattctgtactaagttcatttatttcccattcaaggaaatcagttttaaaagacatagttaattgccaaactaaatgaagctgtgccctctagttaaatactcgctcagctacttaagtgtttcagttacgtttctactcagcctggaatcattcttgaaagttacggactgtgccgtttctccaaccacatacagaaaaacaaatacacctaaactccaatttctcttgagaattaaatcttatgtttcacagcaggcctttctggggcatcagggtggagacttgtttatgagtgatacatgcgtttgtcccaacttcaaaagaaccacattttcagtggtgccccatcggtcttcccccattcgagaaaagccgagagtctatttcatggttggtgacccgtggggcctgaaaccacagaagagcaccagcaaatgcaaatcaatcgcctctcctaccctcccacactatttccgctcgttttccattgaggactctgaccaagtgtcaaaagcggacagacgcacttttctaggtcacttttccttggccagcgagggagcaagcctccttgttttcatgttagccatccctctgaccctactctccaaaatgagcctcagccaggctgctgcttttccacatcactaataagattccttttatggtcttgtgaaaagcgaggggctccagacagatcctccggcaggagggtggaaccacctgcaggccccttccccctaaactccaaacacacgttcaagggcagtttgagtattcacagtcagcttgggccagccagatttaaacgcagccagactctttagcttaaagttctccctaataggggattaacaaacaagataaatactcttggtaaaaatgaaatcccacaacagaaacagcccttggacctcaagagagcttcacagacagcgttggttttaatttttctttttataaaccccttttcatggcagtttttgataactgtcttatctcacccacagcagagggcactttataatgccagctcctgtaatcgtggattttaagagccaccccaagcttcatacacagacacagccagatagtctcccctctgtctcctcccagaatcacaacctaagccggcggacaggaggcagcagagtgcaccccattagagcacgtggtggaaagcaatgctctggggcaccgagctccccctctcaccacccaccctcccagcacaggctaggccaagccccagtcttggcaatgagtcatgcctcctggacagcaggagccaggcagagggcacacccccaacatttccctttcctccccttctgcaatcgcacccatcttccttccacccattttgggatgttgcaagggcctcgctgcaggatctgccagctgggcccgggcctcgagctcctttgggggcggaatggggcggggggatgagggcctatcacttacaccctcaggcactacctccagaagaccaccccttccaagccttggcacggcccccgaaggcttgcgggggccgtgcacccgcccttcccggggaagtctgcaaacacagctgttccagagcccgggaaccgctggaagtgaggccacaagagctacaccactcgggggcgggggcaggaaggggccagcagcgggcgggggttcccaggtctacagctcctgtgagggccccaagaacctcctcctgcggcggccgcccccggcccttaagccgaacctggagagcgcccccgcacacactaaaatctcccggggagcagcgggaaacggactcccccacaccctccaggaaggacacacccgccctcccggccgttcacgggaaaggggaggttgccaatttggacggcgttcgcaggccagaactgcgccgagtcgccttccacggcgcaccaggtttaattagttaagcaaagagatcagctacaacgatctcttggcttggggccgggagagttactctgggaacttcaagttgcaagtttacaccggccttcctaggagcctggtcccataaaccctctgggatccccacttttgtgcactaagcaaatagcagcaggaatgggacccacctcgactaccccagccgagatctaactatagtgtcccggctccctcacccgccacccctagagatttccccagttagcgcctagtttcaagccaaagccctttaaatccctctcgcaagggataacagggctcggccaggcgcgggtgtgaggctccgcccggcctccttcccgagtagtcactcaccggccaggcgaaactgaaaggcagcacgatgcggttgcggtcgttgccgcggctggccttgaggttgaaggtgttgcccccgatgacaggcgtggaccctgagccgaagctgcagggccccccggccgtgacgcgggactgatactccttgaggcacactttgaagtatgtgtcacactcgtcgcgggtgcacttgcggtctcccgggttccgggcgccgccgcagcagttcccgttctgcagctccccgttcacgttctgcatggacaggatctccaactcgaactgacccgaggccccacacacctgccggcgagggaaggaggtaggtcagcgcgggagaaagctgttttcttcgagtatagaggtggcgactccctcccactccccgccccgacgagccctcctcgccgagtgaaaataattttgcgaaactacgttcaaggactcaacatgattccggggcaaaaaaaaaaaaaaatgcacgagtgcggaagaaatccgacgacttcccggggggcaacagcggagcgaacgcgcccctgtccggcctggaggggtcaccctcaggaggcaggggctcccgtgggggagttggcgcgctcagcccaggtgcagccgctcgggcgcaggggcgaggagtcgggcgctcgagggctgccgagcctgctcgcggggctcaaccgcccagggcgccgcgaggggagggagaggacggctgggagggaggcccggagaagggctcctaccttggctcgcagggcacagagcagggcgagcaggaggcttagggggcgcccggaccggccgcgcgtccgtggggaacgcatcgctgcgccgcgcgccgcgggcactcgggacgccgccgctgctgttcgcgctggtgctgccgccggtgctgccgtcgccgctgcccctgcggccgccgcgtcccggctctaatatactccgccgattggagcatgcacgactggaaaacaacaccacttttcaaaagccctttcaagagcggcccgttccagaaggcaaagagcccggcctccttttattattctgatcgcttctttgagacgctccccctcctcttccacctcccggctttctttccttctctcgcgctccccttcttttattattatgattatgcgcagccttttattcccttttagatcagctgcatggaaaaaggggggagggaggggagaaaaaaaaaaaccagcctagctcgcgggccggccgcaggtaacacaatgacgcgtgcccgcccggctctcggagaaggacccggagagcccgtctggcagcagcggccggggctggccacctctacccagcacgccgggcagggcgcatgcgcgcttattaatattcatgagagggcgtgctcaccctgggcacgcccctccccttcacgttgctggggagggggtagtgcgaggaggaacttggaaggggttgggggcagcgggatgctcagggcggcgtagaagaaccagggccccacaccaacccccgccctcgggagcttcgggccaggagggaagggagagtgcggggaggtacttggaagggatcgttgctcagggacgcctggaggcccccagcggggaccgccccctcgggcgccccgggccgtgcgcctttgcccgcgcgtcggggccccaggtgtaggcgccgcggcgctgactgagcggtcggagcggggcagcttccgccttccgaaccgcctgcgtcagctgcggctttcgccccgggaggagggcctgcctgcccgccgggagttcggcccgcttcccgcgagcgagccgcccagagcgctctgctggcggcagaggcggcggcgaggctggcgcgcttgccgccgtctgctcgccccgcggaggcgacctgggcagacgctgctgggaactttgaaaaactttcctggagccaggcttgccgcagattcgaggggaagcctcggccgcgtcccaccccctcccaaatccgagtctgcggagcctgggagggctcccagcttcctatccaaaccgcgccggggcagaggcgcggggaaaccgggggtagaaggcggcgggcacgccggggccctgttcaggctttgggaagggccggcggagatgctggtgggcttggacgccctccccggcccgacgccccggccgcagtgccgggattgcacctgtaggcggcctccgagcagctctctgggtggcaagagatgggcctgggagggaccgtgtccccagcaccgccagccgcggaacttgccttctctggggtggcagtggaaaccgatactgttttccaccttgaggcaagcctcgcaattaacagctacactcctggtcataatcaaggtcgaagaaagcccgtgggctggccgtagcctctgctaacccctctcccacgggcttgctgttgcatttgaggggacctttatatggaaacatcgacttcctttgaagggtggacaaagttttggccctaatagtaggtatgtcctgcagaaaagcgtgactattcagcggccggtttggggcttgagttctcctgggtgtggggcgtgatgggctggcaataggtcaagggaaaatagtttccaacatgctgagttatgagcataaaagggtgggtatttgtggttatctacttattgcatttgatgggaggctcagtatgaacaatattttcagtgccaaatctcatcattctgaggaataaactagggcagctaactgacctctttacataggttcaaagctaccaaggatggttaggagtcttggcattttaacagcctaagaaatgctcctaagaaaagtgcttacttagtggtaatgtgtcccatcttgagcactggcgggagaatccatgttttggaagggaggtttctaagaacagagcaagtttacagctggtcatgttagcagctggggtaggcagcgacaacctgggtgtttcaatgtgccccagcctccctttccccaattatcctaaatcaaggcaaccagttgtcaactgtaatcccatctacacttttctcactgaggtttccatcaacaccagtctccccacttatctgtcccgttctaatttctactcccaagtatccctgagtttgggtgctaaataacggtttaaaagtaaaatgggccgcgagctgtgggtcacgcctgcaatcccagcactctgggaggccgaggcgggtggatcacgaggtcaagagattgagaccatcctggtcaacatggtgaaacccggtctctactacaaatacaaaaattagctgggcgtggtggcacatacctgtagtcccagctactcgggaggctgagagaggagaatagcttcaacctgggaggcggaggttgcagtgagctgagatcatgccactgcactccagcctggcgacagagcgagactccatctcaaaaaaaaaaaaaaaaaaaaaaaaggcaaaatggtgctgaaaaaggctggtgtgatcttaaagagcacactccttggagttccctatgtcggaccctgttttaattctgtgccttgtgccccccacagctctcaggaaagaggctgcggagccagacctttagttaaagtgtttagatctccacctggcttcacctagaagggctacctgagattgcaggtgccaccagttgcaatctgggccacatgcaagctggtgtcacctccagtccaccagtgaatttagcccatttgactgataggaaagaaaatataaactctgagaggtgaaaactacctgattacacctaacaagaatgtcaaatcactgataaacacaaaatttttatgtcacatagcacagagtcccacacccttcctgagcctgggaacccacttttagagaaggcagttgtgggctagagggaattcttttgaaaattttcagttggggctcttccaaataattgggactcccccaaaaagccagtcacgtttaccacaacagacactgagtggaagctctatcctctgcttccttgaagccggttgtcaggccccctccttagagaatgaggaactgctgccgagagaactgaaatacagagattcccccttggcagggcttgtcctgctttggggtatagcctccaagtgtaaatgaatattccagaacaaccttcctgtggaaaatgccatctttagctgtcatacctacacctgagagaaggggagaggcttgtagtcagttactatctgacctgtctcgtgtgctcaaacatcatccttggatatcttttcctttaattctaaaaagatgatggatgcctcattttttcttttcccagaaaacttgccccacttttatctagtcaacaacatatagcagttctgaacctgcaaaagctttataagagacattcaagctatattagctgtatttaagtacatctaatcaactgtaatccttggttaatcaacactgtggttaaaataagctaatcaatatttattgagaactgctattataagcagtaacatcgatgatctaaaaaatattatgttaagtgaaataagccagacacaaaagactacatcctgtatgaatttatttatacggagttccagaacaggaaaaactggtgaaaaaagatcacaagagtgattttgagggtgggtgggtgggagcagagcttcactgggatgggcttgaggctcttctggtggcattgtggggtaatgtttcatatttttgataggtgtttgggctacacaggtgtatgcatttgtcaaaatttattaaatagtacatttaagattgtatttcattaggtgttcaaaagaggaaaaaagaattgtgaacagatattcacctccagttatatgagtgctgaagcatttagcggggaagtggaatgatatctgcaactgacactgaaatgcatacaaaattagagggatcagagaggatggctgggtgggtggttacacgctgaagcaaaatagtaaagtctttttttgtttttttgagacagagcctgttgtccaggctggagcgcagtggcacagtcttggctcactgcaatctccgcctcccaggttcaggtgattctcctgtttcagcctcccgagcagctgggattagatgcatgccatcatacacggctaatttttgtattttttagtagagatggggtttcaccatgttgaccatggctgctttaaaactcctgacctcagatgatcctcctgccttggccacccaaagtgctgggattacaggcataagccacagcgcccagccagtaaagtcttaatggtagaatttaggtgttacagtggtgttcactgcaaaattcttcgacatttttctatgtttgaaaattttccttcttaaatcttggggaagatagttattgatttgccaggtattttgtgggtgccaagaatatggtgggcaacaccacaatactggtcttcagcactactgagtggagagtgtgtttcaaaggaatggtgatactgtagattttaagagtgaatgaggctgggagcggtggctgacgcctctaatcccagcactttgggaggccaaggcgggcggattacctgaggtcaggagttcgagaacagcctcaacatggagaaaccccgtctctactaaaaatacaaaattagccaggcgtggtggtgcatgcctgtaatcccagctactcaggaggctgaggcaggagaattgcttgaacctgggaggcagaggttgcggtgagccgagatgagatggcaccattgcactccagcctgggcaacaagagcgaaactccatctcaaaaaaaaaaaaaaaaaaaaaaaaaaagagtgaacgaaaggaaagtagttctttcttcccattcttcattccagttaggttcaaattgtagagaaggcacatgtaaaatatccattaagatcttccttattccttgtttgaacttgcagagatgttaacacaagttcacaaatcctgttccacggatatgttatctttctgcccctttccagcagagcccagtgaagctcacatgtcccgccaggttactgcctcccatgaacctgtccagccagctccctaaggaagcacaacatcattctcccacatcacaagatattctacatggaaaaaaacccaccaccaacctatagataacagacactgaaaatcagggtatagttgtagcaaccacaaccaggccacaagtttgctcattcaagcataagttgagtagatccagctatttttttcccaaagattcatcatatgtacacaagagatctggattaattttttgaaaccagaactgtgaatttttttgtattatcaacagtgattttgtatgagcgcatgttaaacattgtcttggttttatcttgagcccaggtagttatgattttgtcctccctgccccaatcctgtttcatagtcattatgtggaaaaccatcaggatgaatagaattatgtgtccacataccctttaccaaaccaatcacagaaagtcgccaaaaaacttacatgcaaaatctcagaactacgagactaatatttacattttactccttagttaaaatcaaatgttctttgtgaagctagagtgtgggagaagtcctacgtacaaaatgtacttttttcttagagttcagtcttttcagggaaaaaaaaaattctgcgtgtaagttgctgttaaattggcattctcaaaacaactgtaaatgattcacatatcctccttttttttggcactgatacagtgagtcgtctgttcttgtgaatggcacttgaatgacttaacctatagatattctgggatggaatttttttttaaccaaattggtccatttgtacagtcgactgatttaaatgcaactaacaattttctataattgtgaagtatgactgatctcttacaagccttttcatctcctgaaaggttctggaaattacacttccagaagcaggtagtatttggaaactaccacaatacagttttctctgtgagtacctttcatctcacttgcactcagcttttccaaacagatgcctccagatctcaaataaataaataaataaggtaaagtagttgctggaacttgaggaaggagagctaaatgtatttagttatctgagaaaatttcaaattttcacatacataaatgtgagagtcaaagaaaggtgattgcacctgccaatggcatgaaaataacagagctttgaattacatatttcatgttcaggttaatggtcccaaataaattacaagactgtgtctgtgtttgacacttttgttctcaagccagtggtttctgtactgatggcttcctctaaattagaagttattaagaacatcaaaagtggatcattgcaatgcttaggtttgatttcccattgggaagataaatagttgtttttattattgctttatgctaacagcacttaaggatgactaaataaagaaatactagcttcagcacagaaatattggtacaagtaacaactatacacttctagatccttagatattagtcataacataggtttactgatacatagattttcataagcatcattcagaaatcatttcagagcaatatcagaagttctttttgcttttggaaataaggctaagacatagaaaacttagaaagactataaagaagaaagtttaatttccaaaagatggttatttcctccactgaagtgataatatttcttaaaagccagataaaaactagagaagtcaattattctatttcaggatagtttggcagaaattcatgtgaagagaagttggggtcgcgggggtgggtttcaacagaccacacaggtagtgtaatgcagatactaggaagggcagggctcacagtctgaggaatgtaggcgttggcagtcaaggaaaaatcatagccccagcatattccgcattggccttaacacatctagaggggtctatccagctctgggctggagattttttggaattgtggtaaaatatacataaaaatcaccatgtgaaccaatttttaattctgttgtattcagtaaattcacattgttgtgcaacaatttacagaacgttttcatcttgcaaaactgaaactctatacctattaaataacaacacccatttaccttcctcacccacccccaggccctggcaatcgccattctactttctttctctatgaatttgactaccctaggtacctcttaagtggaatcatatggtatttgtccatttatgcctggcttatttcacttagcacaatgtcatcaaggttcatccatgttgtagcatatgtcagaattccttgtcgaggctgaataacattccagtgtatttttagaccacattttgcttattcattcaaccattgatggacaccagagttgcttctaccttttggctattgtgaataatgctgttctgaccatgggtatgggtgtataagtatctattcaagaccctgctttcaattttggggggtatctactaggcaccatttttttttttttttttgagatggagtctcattctgtcacccaggctggagtgcagtggcacgatttcagctcactgcaacctctgcctctctgggttcagcaattctcctgcctcagcctcccaagtggctgggattacaggcacatgtcaccacgtccggctaatttttgtattttcagtagaaacagggtttcaccatattggccaggctggtctcgaactcctggccttgtgattcgcctgcctcggccttccaaagtgctgggattacaggcatgagccactgcgcccggcctaggcaccgttttttaagagaatattgaccaactgtgccactcccagaaaagagtgataaaatgtctaaaaatatagacctttaagcagagcaaatgaaggattgagagggtgtaaccagagaagaggagaaaggaagcatagcagctctctgcagtgtggggaaggctgacttgagagcggacttgaaatgctgcagatgacagaataggcttaatgggtgaggttacaaggaaattgattttgactcagcaacaaactttgttttcataagagccattccttaatggaagaggctcccttggagatagtaagtccctgccatctatggatatcaaacaggctgacaggctgctgtggaccattgtcagtggcaggagagagggaggttccctgtcctggatgggaggttgaactgagtgatttcctaggaatctactctttatgaggccacagcaaaataaatggatagggtggaaactcaggtctataaacataaaaagcatctaggagccagcttttaaacaaaatgtgaagttgataccactgattgaggatgatcacaacctggagtacagaagtgaccattttgcacagatttatctgctttttgaactcactcttctaggatctatcgcacacatattgcctgcaacaagtgagtcaattctaaatgtcacagcactggtcatcatagcctcggtcttattattatacctttgctattatgaatgcactctgaggaccagcagcattggcatcacctgggagcttgatagaaattcaggatatcggacccctgtcccacaccttttgactcagtatctacaatttcacaagatcctcaggtgatttgtgtgcacattaaggtctaagaggccttaatctaacccacaacaacagaaatattccagagttagtagaagttatcaaatgatctttccactaaatgattgcaatactctatcattgggtaaaagtattggctaatcaaatccatctttgattgtcccattatgagctcagcgtcgtaatggaaattacagttatttatttaagtatatatagaccagatagttttttaataattttcagcaaatttcaggtaaaatatataagccaatagaaaaatataaatgaataaatatcaggaccaaggaaaatggagctgaagatagaagatcaagatcagtgacaggcaggtcaaggatggctacttcagttgagaattggatgctgagctccttgacagccaaagtaaccaaggaaacacagtcagctacaagattaacagtctccatgcagaatcaacaagctagtccttcagatgaagcaaagctttttctggcattttgttatgaaagatatacacatatgtgtgagcatataattataaatattttgggtgaccttgcgtcttacattatggaatgcagaggaaatgcaactgcttcttagaacggtgcaccctgaactgagggcatggcaacaaagcacagctcagaggaagcagtctggaggtgaagtgggggtggattgaagactctatcattgccatggagcaagctggactaacgagccagaggatgaaaggttatggggaagagaagtaagtagtcccagatgagatcatctttgaccagtcagcctccatctgacctaccagctgactgcagacacatgagcaagcccagctaagatcagcttaccggcccagatcagcagaactttccagtcaactcatagacttgtgagaaataacaactgactcctttaattcaagtttggagctggtttgttatgaagcactattgtggcattagataactactacagccttcatgggtgaaaattttaaagaaaacagaaccacaaatgtcagcttgcaagtattcaatgaatgataatcactactagtaaacttctgtgagccaaacgtagcagagactggccaaccttaactcaataacctccacttgagaaagcaagctgaaatgtgagttaaagtggccttattgcaggaataatcttgagtctgctccaacttatcttaaaaaataagttattagtaggctcccctgaaacaatcctgataaagactcttataaccaacttctacttaacctaatcattggattaaccaatgttcagcattccttctttaataaatactgactgttccccacagtgtggagaacgcttgcagtaaatagactgagttctcatgttcctatgcagtctgtttcaaagagggaatcagctgttatacttcccagtagtcaattgggagggttcccgaatctgtatatgccaattgtacttattatatcattcaactcaatattacataaactgatgaatatgagttcttaaaaaagatagtgcttctatgcaacccaagttaaatgtaacttgatgaaaataaatgtgagtagctaaaaatgaatttttattcaatgaatgtcaccaagacaattttaaaataatatttaactattctgaataatctagaagaattctgcgtttaaattgttttccaaatgtcttttagctttcctatttgactaacaataataaattagcttgttatagatgtgataagctgcaatactaacaacttaaaaagtttttgtcttatatcaaaagataggcaaatacatattcatttatacatttgatattaaagtaaaacgtttgtgtctcatgttttatgattccatctttaaccaacatttttgattaaccaaccaattactagtgatggttgcatcacttaagaaggttttattctgttagtagagcctggaccaatgcctgacacataacaggagcattattactaactgctgaatgaatttgttggatgaattagcggcaaattgctggcaatgcccattacaaccaaaccagacatgttttcacacaccaatgtgttttaatactgagttaaaaaaaatacctgactttttactttaaccatactttctttaaccttacttgtagaagatggaggaacagcttagctttccaatatttctctaaatattgcttgtttataccaggtctctaacaaaggctgataacgtaggtttttggtgttgttgacagtgtcccactagcatgtatcagaatcacctggaggccttgttcaactgtaaattgctaggctctatcatggagtttccatttagtaagtctgaggtgggactctagagtttacatttctgacaagttgccaggtgatggtattccaaggaacaaactttgagagtcactgacctggtatacctccagaatagtacagttatcaaggtcatcttactcttcctctaaccatttaccccagtccatttaattccttcaaatgtctcaactgatactggatttgacttcaatgttctggcaataagtattgaattggctgggtaaattgatgggatgaatattgaattgactgggtaagttaattggctgggatgaggcaacagatatataaacctaggttatgggccaggtacagtgttgttttattacattttataatttaacccccacagcaacactataaagttgatattaatatctccattttatagatgagaaaaactgagggtcagaaaggtgatgcacttctataactagcatcactttttcacttagtatggtctagatggaggacacacagctagtaatcagtggagtaagagtcagggtcaactgagaccaaaggccctgttctttccacaacatctagcgggaatataaattatcaggtcgctaagatgaacacttaaatctaaaacaggacttcttggactttaatgtgcatatgagtctcctggacattttgttaaaaatgcagattcctattctacagctctaggacaggcctgagattttgcatttttcacaagttcctaggtgatggtgatgcttagaaaagcagtgctctcaaccccatttgcttgggtgcagagcctgggatgtcccttagcaggaagtggaggtcctgaatggcccttcagtcatgttataatatgtacactttgcctttcatttttctcagtgaagaattagaagagggaaccaaagggaaatttatattaaatgaataagcccaagaaagaatgccaaggccatatattcttcttgagaaaaaggaggatgagctaaggaaaaaggaattgggactgcctgggaaccaactagggaatatggtcacctgttcaccaactgcagcagcatgtgatgggaatctagaacaatccattctgccctctcagttaccatctactggaaaagggagtgtggaattatagtgaaagcagctaggagggccaggaactttaaaatccctcttcatacctttcatggcatacctgttgctgttttattttccatatttgcatatgataaaattcactctttttggtatatggctttatgaattttgacaaacacatgcagtcatgtaatcacccccatgatcaagacacggaacatctccatcactcccccagtccgatcatgttgccctttggtcctcattccctcctcctgtgcgtatagttttgccttttctggaatgttccatggatggcaccaaacagtatgcagcctttcgagtgtgacttctttcacttagcattgtgtatttgtgattcattcacgttgtagtgtgtcttccaggttggatccttttttattgctgagtgatagtccatacagggatgtttgtttatccatccccagttgagagatctttgggttgtttcatatctcattggctatgaatagagctgctatacatttgagtacaggtttttgtgtaaacacaccttttaatttttcttaggtaaatatccaggattgggattgctgtgtcatatgggaagtgtacatttcactttttgggaaacttgaaacttgctaaactgttttccagagtggctgcagcattttgcactctccccagcaacgcatgaatggtctttctgagacgcacgacccacacgctcctcccagtacccagacacacatgggtggacacccttcactgcagggatttcagtgaggtcgctgtcagagcaggagccacctgggagaagactgaggtcagaggttttgggaaagccagcgagcctgggcctacctcccccagtccttcccagccttcaggcccatctgttagggcccttgcgcctcctccttgaagaagcctttgagcccacctctctccccagcaagtgtgcaagccccaaaacaccaccctcctggtttaggctttgttgtcagataatgtgactttgaaaagaagcccctcctctcccaccaaaaggaggataagaaaggcgctcagatcaatcctcagcagatacatggagtcgcaaagctccagaaaatcctttattctcttttctgagcagctgctgcggcagcaccccgcccccagctctgcccccagtggaaacctgaaagctattcatatcatttaatcctgttgaaaatcctcttcgctctctctcgctgaggtgtggtcggctgaggtaaacctgggcttaattcatgtgttggaaagcagatgaaaggtgtcacatgatttgacattctatttaggaaactgactcttccctaatctagaagcttccactcataacccctgtttgaaagtggtcagaataaaatcttcaaggtaaagtcacaattgggttttctttgaaggtgcattcacttcagaaaacggagcaaaagagcagaggtaaagtagagatggttcaaggggtttggagtggatttttacctatgtatcactcagcttaaacatctaccagattgtttacattttatcctacacatggcaaaagaaaactctacaaccattttaccctgttgccaatcatggccacatattttagttctctctcttgccaccaagaagtatgagatcttatagctaagttctttcattttaagaaatttggacataagatactgtaaagctatatccagaatgagtgttcagtctactctcttttattgcagagctcattgatatgcatcactggaaacatgctctctgaccttctcaggtgtttttaggctgggagaagactccccgtaagagtttcatagctccaccagttacagagaaagcaaaagagcatgggcaatttcatccatattcagagaataaatttcttctggcttgtttcgggacccaaacagtatttggagaataaatgatcccagatggctaattaagggcgacttccttatacaaaaaattattttaagaacccccatgaaaatctcaattccctggcaggcaatatttattaaacttctcctaaacataggctggtccatgaggcatactggagaaacacaaatgtaaagtctatcccaaagggctttgtaatcacagagtacatgaaaaaatatcagagcagtagcagggatattaaacccgtagtcaacatgcacaaccttagctgtacattggaatcacctagggaactttaaaaattattgatgcctgggccccaccccccagagatcctgatttaattggtctaggttacagcccgggcactgagactgtttaaatcttccaatgtgtagctaaggttaaagcctgccgttctagctaaacaaaccatgcactaagcatgtgactgaattaatgactttaccagagccttctctttcgcagagggcccatccaatgtgtgtctcacggtgaaatggtccaggaaagttaggtgagaggaagctgtaggacacataagactgggatctggagttgtgtgagagagaaactgagaaaatgccacactgacgcttgtcaagtaggaaatacggttgagtaatggagggaccagaaagagcaggagagtccttagaaaaatgcgtttcttgtagatagtgctttacaggttaaaatcactttcacattatttcctcataaatatggaggtaagaaagcataaagaataaaagtcagatagacttgggttaaagttccagctctgctactgctgagctctggaatcttgggcaagttacttaaattgcctcagttaagtaactaagcctcagtttcctcatccatagagtggaaataataatagtgcctttcttataaggtggctgggaaacttaaataatgtatgtagaatgcttagttcaatgcctggcacatggtgagctcaccacatgtctgagttgccactgccattatcttcagcatagtcatcattgttttggtgtagaatggagacctatggtcagcctcaaccaaggggtatagggaaatgagaagtgagtgaagtttgttctgaatgaacagagtaggaactaaaaatcataaaaatacttcacaaactaaggccaaaggagccgttacattatggttggaacatttgatctctcaaaggcttcatttatctgtgacaaagtttgtgcttgcatggcattttcagaggaagggaggtagaacttaaccagggagtgaagcagcaggttatatataatagttgctcagttaaaaacttgatgagttgaagtgaacacctcttgagtagctgtaacactaagtcttagatgaagcttggctctgcatgagagaatagtgtgggtgggcagccaggccacactcagtgacagagagctgagtcctgggcttgagtggatgcacctgggaaagaggacggagatgagtgaggagaaagagagcactggtgtatgtttgagaggttgctagtaggtcataagccatagagttgaaggggctgctgagggtgaaatcgagatggtcttagattagtgaagaacccgctctcatttgagacccttctttaggtttcgtggcccttgaacccccatgaaaatctcaattccctggcaggcaatatttattaaacttctccaaaatataggctgcccttcctttgcatggcaggaaaaatgagaagggtggcaggaagggtctgatgttcctcccaagatcaaaggtaatgtatacttgttggttttatggcctcagaccaaggcacgggtgatgattgccaatctccctttccattccaaggtcctaggcacccactctcttctaactgccctctctcaatgtccttcctgctgttttcaaagtccttctggggctgacctctcagagagctactagatagttccttatgatccctctagcttaatgcttgtcacagtgaagtctccattaagaatcacctccagaagttgttaaacagattttcatccctccccctaccaagagtttgattcagaaagtctggggtggggctggagcatttgccttttagcaagctcccagttgatgctatggctgctagcctgagatccacactttgagtagccctgatctgaccaccctgcaatcccagcccctgctgccctcaggattcttgagtgtgtgcgtttgcttatctcctaggggaggggattaactttagtaaattatccaggggctgttagttgggattctggcttcagatgggggattctcagcagatgtttttaaacaggactcaaatattggtctttttggaagagattttatggaaaacagagtctatgatgcccacgttcttctaaggagggccaccattgcgtattgtgttccatctaagcttaagagacatgaaggggtaagatgagggtgagatgtattataaaattttgtaaattatttaaagtctgtatgccaatggcttttttttttttgcacctggggaatttttgagaaagaagacatcctcctcctaacaatcatctttttgacaatttgttcattctgctgagcttcctttgaagtttgagtctcaaaaccaaaactttccacaagggctcctttgtttcttcctgatctgccaggatgaaatcctcaattcggcttgccctacctcacaaatagcacttacacgtatgctagaactgccttttttaaaggaataaaatgcaatctaaatgttctgccgaaacaaaaccttctggtttaacaatagtcctggtttcttccaacatgtggacttttggggtttggtaactgaagggggtgaaaggttctgttggttctcagagactcaaaggtctccctatggatggccaaactgcgaaatcagagccgcccagagtttgttgtaaacaagtccatcttaattcctatttgggatttgtaattgcttggtcctctgagaagcctcagtgtggaattgccttatctaactagttccattctgtggatttgccacctgtcccaaggcagcctaaattgagtgaggcctggtgtccttgcaaaagaggtggttcttagacaacaactggagtttattttgatctctatcttttgaggccagaaactgttcatgtttaactttaaagaaagctgtgattttttttttttttttttttcctagaggaaagctgcaatttgaaggcaggattctattaaaaacagacaaataattcccattccttcctggtcctgcctattgttttcctaagtttgtttggattcccgggttgaatccttctggctaaccctccaaagagagggtcccgagcactgccatccgtgaggttgactgtctcgtgaggtccttggggaacacatcctgtttctccctcaaagaggcaattggaggatgtgagagaatgtctcctgtcttctccattcagagagcctttttatttcctccctatgttttgtctatagacggtttcagtcttcctaagaagaactattcctaggaagaaatgttggtctggagccaatatcacttataggtaatacattgtagactatgggttgctttaaataacccgtgaccctgtcctcaacaagtaatccaccccatcctcgaaacacactttaagcagagttatacagcaccagcaacatgcctttagatgcattcagctgatcccaccctatatgtgacacacactttcatgccatgaaaggtgtccctaacacttggccatggatccttatacccaaggagtcctgatatgcttgacattcttcatgcagccgttgcccagcaaccagagctgagatgctagttgcaacctaggagccatccctgaatcaagtgttggcttttctatttagaattattatttgtcttattcttacatttctgttggaggaatgttgacttttatttttattattttttttttaatttttttttgagatggagtctcgctctgttgcccaggctggagtgcagtggagggatctcagctcactgcaagctccatctcccaggttcaagtgattctcctgcctcagcctcccgagtagctgggattacaggtgtgcaccaccacacctggctaatttttatatttttagtcgagacagggtttcaccatattggccaggctggtctcaaactcctgacctcaggtgatccacccacctcggcctcccagagtgttgggattacagtcgtgagccactgcacccggccaacatttcttttaaaaggaaaatattctggagacagtgataatgtgatattgccaactgtatgtgctttttggggccttctttttccccagatccacaggaccatgctggcctaaatggggagaggggtgccacacggtcctgtgtttcctttctctttgaatggtgctggtaaatgcagatgcagttggcaatgcacgcaagaaagcagttacttgctgagaaaattcctgacaaatattgagagaggcaacaattttttctcagtctaaacatgaaaaagccactgctgattaaatgtatctggtaaagaatcttttcctaaagttttaaactgaaacctctaaaacctttttcccagagtattccaaatacagacgggcaagttgtattttttccaagttgccttttcctgagggaaaactagtgatgtccaaggctggcagacacggagctctgcgcatcctgataaagataggaactttaggctagcaaaaaatccaaataaacagattttcaaacagaccagctttccttttggtagctgaaaaggaaaccccacatccaggaggaatgcagatcaaagcaaagcctacaaatgatgcagaaacacataaaataacaaacaagcctggtgggaagagggaactttttgtaaaagaataggcctcttcatattacactgaaattgaatgcaagattgcaagcaaagatacatgagttgggaatacaaagctatagtttctttctccttttttggggccaagagtatacctttaataggtcacattggaagccactaaaagcaaaggacaaaagataggccccttgttggaaatcttgcctagttttccttttgcagttgcctctgcttctctttcttggtataaagtggacagaataattaatccatttggctgtaaaagtggaatctaaattgccctggtctctaagcatttcatgtcaaaagctgagcctttttaattcttgaaaacctggttctatttaccagggttctcaggtgagacacagatgtaaaactgttggtatgatgacattttaattcagatgacccttttccctgatgttaaaatttatgtggggtaaactctcaattggatcatagttagcagggtaaaaaatcacttttatgatattttatccttgggaattaagcccatttaaatcatatctgtgttctgactgtgaggtgctaagtggctactgaagacacagaacactattggatgctattactcactatttaaaaatcaaaattaccagaattgttaagtgtcttattttttgagaaccactggaatgaatacttggtggtagagttctttttaaagaccttgaaatgttaagtggacatttagttgagcttctagctcatatgttacctccattgagaaaggggagttggccatccattactaccataggtaatctttagtaacttgccccttgaagcagcattagcattgtctaggaacattacctggggtatattcctcggagcggaattttgggttgctgcatacatttaccttcaaatatattagctgctgccaaatggttctccccaatggttgcagcgatttacaatcctcccactatgtaacaattctgtgtcttatggtttcatattcttctaatgctgttatcacacataaccatttttcttaccagtttttgatgaatgagaaatggtattttgttccattctgtacatctgattactttacagaagctatttattagacgtttgaatttcctcttcagtgaatctcatgttttgtcaatttttttttgtgggttgttttttcttacagattttgtgtaagttattcaaattatctgtagagtgactctatcattgcaagcattgacaatatattttttcagtgtatgacttgactttttcattttaaaatggtatcttttgatatacaaaatattaaattttaatgtagttgaattttttcatctccacttttgtaatttctgtgtgtgtgtgtgtgcgtgcatgtgtgtgtgttttacatgttgtcaggaaaatctttattactctcaaaccataaagaaattctcctggattgtcaccattgagcccttagactacctggaatagattttctgcatgatgtaaagcaaggacagcagtctaacaagctatctccccagccacattcatacatagttcattgttttctcaataatctgtggtgcctcttctgttacctgccacattttaatgtatggatgtgactgtttcaagggtctctattctgttccattgacctttctttattcctgtgcccataccataccacattcatcactattgctatacacaaaacatgtttaacatttggtagaacgagtttctgtatccgtcttcatttttttttcttttaaattgagctattcttttttgtttttgtttttgagacagagtcttgctctgttgcccaggctggagtgcagtggcatgaccttggctcactgcgacctgaacctcccaggttcaagtgatgctcctgcctcagcctcctgagtagctggggctccaagggcctgccaccatgcccagctaatttttgtatttttagtagagatagggttttgccattttgccaggttggtcttgaactcccaacctcaggtgatccacctgcctcggcctcccaaagtgctgggattacaggtgtgagtcaccatgcctggtcctaaaatgggctattctgggggcattgcttttctgtatagattttatcacctgattgtcaagattcatgaaaaactgggtagacaatttcattgaaattacatttaaattttaatttgcagatcgatgtttttgcaattttaagtttttcatctgtgaacatggtgtatttctttgcttattaaagttatttattgatgcccttcaataaaggatttatctgtaaaatatttgcatatcttttgttagacttctaggtaccttatatttcctgttgctgccagtttttgttgttctcaaccaagaactctggcatatgcattcatatttatgctccaatttaaaatatattaggtgctaatgcagctgtataaaatacagttcttatctttatatataattcatactgaagagcaaagacagatggaacaacaggattatgtgggcattctaggatgaagtgccaatcatcatcagagttagttgatacgaggtagtgcagaagagagaaaaggccagaggcaggctggttcagttggagaaagactcatcaaagggatataccttgaaggtttagtagcattttgataaagaaatggaatatatatgctgaaagaaagcttatcaacataaagttgtacatggttaggtgacagagggttgaagatggtgaggagatgtggccagactctggatgacattgaatgttaggacaagtttgcactttatcttttattccctaggaagccttccaaagttggatgatgtgttgaacctcaagtctgacatttgtagaaagaggcaagttaggagaaggggggttaccttgtgataaatcttttaaattcattttgattcacagatggttgtgaactgaggcaaagcagttgttgtatatgaaatcaaatgcgttcaagacaagttttagagtcaggatttagagaaggcgttgctcttaaaaattctgagaaaaagctggagttctaggaactgccaaggacggatggctcaaggtctagcacacagtataacctctttattatcttcattttctttctgtaaaaaagtattttattacctgggcttttcaaagtattcttcttggcatttactgaggtcatgtggcagaggtatgggttggggctgattgagtaatatgaaggtatctctggatgtctgtgaccttcatgaaaaagccctcattattctccactgcctgataagtgatttactttcttccccctcaaaatttcatttcaatttcattgaaagttgtgcatattcttttctccattaagcatcatcttttgtttcctaaaagagccagagcgtggaaggaaggaatgtagctcaaagtgatgggggacctgacaggtacgggtgcagggatgaacaacctgaactagaggtgttgctgccagctgtcagaggaggcctcaaggacatgtgagtttcttttttttttaaagcacaggagacagtttctgaagtagccaaagagcatgcttgctggacacaaccagctctgtgaaatccaaggagttgtcacttcctgggaaggttaatgttggaggaagacagagcaggtttcgctgtctgaaccaactaaaggccctgagacaccagtaaccttcagttccttcccctcaccccgaatccctgctcattcagcaatcccatttctttctttcttccttggctttcatcctccgcagtggggaaaagaattccctgccatttcacaataagaagaggatagtgaaagcgtattctgttatctgaaggagccctttccagtgaatacgccactgcaaaccactcaatgtactcggggtgtcagatttctaggcagagggtggcctgtcccaaaagggaacttgttctgagaccatataagataccttggaaataacagctccaaataactttgccagttattaagctgttgtctttcaactctaaaccctccctcttatatccttctctgtgactctggggccgctggagcggagaccctgttagttccgtttcagccttgccagctgctgccagtagggggtgctagactgaaactgcaatattggagaagaaagcaatgccttcctgtgtcacctgagcaacgtttgttctttgaggaagcctcatttagttctggtagcagcaggtggttctggtttgcagtgtattcagcactcacagaacaagcattatcacattcccttagagacaccagaccagcatcagctgcccgtgtccttccaagatgcctgggtccagcttgtgggagggactgtgaatcctgaggacagcaccagctgagcttcggatccttctcaatggtgccttttcagttctgcagggccctcctctcctctgagaatgtaagttgaatgattccaatctcttccctttgttccctttgctctaggagctgctgcctacagttgctatctccttgacacctaatggtttcctttttgcctgttcaattaccttgttagaattttctacctagttaacaattctattctctctttgcagtcactgttgcgatttctattggatgtaactagattagtggttctcaaactttaagatgcatcagaatcatcttgagggcttgtgaaaacacagattactaagcccgttcccagagaatctgatgtagtaggtctgaataggtccaagaatttgagttttctttttttttttgagatgggttctctgacatccagactgaagtgcagtggcatgaactcagctcactgcagccttgacctcctgggctcaagcaatccttctacctcagcctcctgagtagctgggactacaggtgagtgccatcacacccgggtaattaaaaaaaatttttttgtagagatgggaccttgctatattgcccaagctggtctcaagctcctgggctcaagtgatcctcccaccttggtcttgcaaagtcctgggattacaggtgtgagccactgtgccaggcccaagaatgtgaatttctagcaaattctcaagtgatactgatgctactagcccagaggccccactttgagaatcattgcactggacaaagcagtccactcctagagaaatatttgtcctgaaaccaccataagactccttggaaatagtagccccaagtacacccaattgactaatgagttaatgatgttttgaaaataaagtagggtgatgtccaaggtgctaccaattgccaatgtagtaagaaaaaaaatgaagagcatgtgtgatcattcataaagtttcctgcagtgtgatcatatatcaagtttcagaatggtgtgcaagaggtgttcctggcattttataaacccacaggcttcagagagggagtggttcaatgaggtacatctaaatggttctaaacaagagtatatatgaaagaatcttaggttatttggtggggagttcagatttgcccttatatgttttgtcatgctaacaaatgaaaataaaaactcaaaagcccacgcctgaccatgttgaacagctccatgcttgcttgttctttatactcttccttgacatgtacatggtagtttttgttttctcccttgcatgttctgggagggaagtgagtatcttaaatcccccttaacggaatagaaaacataatacataataaattagggactgcttttccacatattcccagcaatcatgcttgcttagttttggtagttgtgaggtgaggggaccagaagagaaaatcaggacactggggtcagaaattccaaggttacaaattcattgaggttcaagaagatgggaacgccaaagcttattgagatattactatggttgcaaaacaaatcaccctccaccaagtggctagaaccagcaacaatggcacatttgttttgcttatgaatctataatgtgggcagaattttgtagtgacagctcacgtctgcttgattcaaggtcatttagagtggctggatgctggggctggagtcatctggggctccttgctcacaggtctggtggttgatgctggctgtcagctgatatcttagttggggctgttggagggaacatggccatgtaatctttccatgtggcataggcttcctcacagcatggtggctgggttcccaagggtgagtatgaggaaaaggtaggaagatcgagaggaatatcaggcagaagctgtatctttttaatgacctagcagccttggaagcccgtagcaccacatctgcaatattgtattggttagagcagtcaaaagtctcagcctagattcaagagaagggaacccaaaccccaccactcagagtgaagaagagtggcaaaattctgaagagtatcagggaccagaaatattgctgtggacattagaaaaaaaagtctgccatattctttaacttaacctgcacccttgctcaagcccctgataccatctttatgcaaggtaatcctattttcttttgggatatgatgactgaatcagaggtcgacccctgtcatgagaactgggctaattggattctgtcctgaccaagaatttaaacaaaggaaccagaatgagacatctatacttctggatctacttctggagtcaacacagcttgtggacttcagaactgaaacaggcacttttggtccatttgcatagagaagcagagatccaagactgtatagcgaaacaaaggaataaaaaaggaaaggcaacctgtgtttgttgctgatggctccccagcttccttgtgatgccccactgatttatcatctctagttttgtgagacattcttgtatcctaaaagcaatccccactttttgtaagaaagctgtgtggatttctgcagtctgggtagacagcaggagaagagaagacagttctccaacagaggggtttcgcttctaacaagtggactgatttgtactaggctgtccctgaatctgttttccatgtttcctgccctttgattttatgcttcttatcaagggtggccccacccaccccacccatttttcttcaactgatattgtaggcacaagaaaatacctcgtggaaataggccagggtaaatatatgagcatttattctgaatcagcttgattttcaagttttatttatacaaaaggcaaatggagatgttcaatgaacatgttttatgaagaataataagatagaatagtctgtcatggtttttgccgggcctgcacccagatgttcttggaccctttttactggttcagggtggccccatgcctcagcttgtgtgcactgtgattctagcagcatgaactattagctttcttcagaggatggcccttaagctaccagcactgctttgcccatacaacaagtggacttccagaagtatctggtagtttacatagccaatgactaacaggtgtgggtgtatgaaggcctagctccctatctctaggtgggccaaactctctggtataatttatccttcggagtttcctgcaggatgggcctgtggccgggactttgcctgaaatcaccaccttggctggctccttccctgttctggtttcctcattcttttactagtttgttctgggagctcttccttaataagccacatgtacgtgaattcttgtctcaggctctgcttctggataacccaaactaagatataaaataaaatgtcatggtaaaagagaagtgttaaaacaatcaagcttgtgttcgggtctctgaatacagaattgatttattatacagtcatggacccagtttacttttctaattttgtctctctatctaaaatatggaggtggattctagctttctccattgtttttgaattttattatttgcctaaaattttggctaaatcttgcactacttcctggctataataaatctctaaagaagaacctggatttaattttcttcatggtgcttttagttgacttctcaaagaaaaatttttttttcttttttgttctggcatacaaattatctttttaattataattcttatgtacatggtatttctactatgacagtattacctggaaatatgctttcatggcaacaaagaacaccttgacactcaaattttgatcattgatgctttcaagaagaaagatttttgatcaaaagggggaaacgagaaaagaaaagaacttttatctgaggaatgtgagtccttttttggggggacagagtctcactgttactcagactggagtgtagtggcatgatctccacttacttcaacctctacctcccaggttcaagggattgtcccaccttagcctcttgagtagctgggactacaggtgtgtgcctccatgcctggctaatttttgtagtttttgatagagatagggtttcaccatgttggccaggctggtctcgaactcctgtccttaagtgatccacccaccctggcctcccaaagtgctgggattacaggcatgagccaccaggcccggcctgagtccttttaaattattaagctcaaagagacactaaaatgacaaaaatcatgtcctacttcccccttgagctatgtgttcatctcttgaaactgcttgctagtgctataagtagctataaattaacctaatagtgctgcaccagacactgtaacccataccttacagcttaacaatgtagagccaatcactaatcaatattattgctgtaaaccaaagagaattcttgacagaaaactttgtatcagcccatgccctgtgacccttttttttttgcctttaaaattccatttttaattgctgctaatcagagtatatattcagggcaatttgaatgtatgtacctgggttgcaatcttcaaggttggcccaaataaactctctacttatatatatattttaaatggaggtaataattactaccttgtggcctcatgtaacagatataaatttcatctctgtaaatctgtaactatatcccaacagggcttgaaagatatagaccagcattgtccaataagactgtttgtgatgctgcgttctctgcattacccattacaaccactaatcagatgtggctactgaacagtttaaatatggctagtgtgaccaagggattggatgtttaattagtttaaatataaatagccatgtgtagtgaatgtatatcatattggacagcagaaggtagactagatgatagtattataaagttgatttcctgagttttgataattgtactgtggttatttaagccatggttttataaacttacacagaaatatttaggagtaaagaggaatcatgtctgctacccattctcaaatggttttcggaaaaaatacatataaaatagttgtggtaaaaaaatgttaatatttagggaatttgggtgaaagttatatgggaattttttgtagaaagtaaaagggtaaaaatgtcaaattcttaactgtcatgatcataaactggaagatagtagttgaagtcaattacttaagtggtagccatatataaatattatttagcaatatggaggaaaatactagaagaaaacaaattaaattacctgaaatattgaaaatgtctatacattcttcccattccattctgcatgcccttttgcaatataattttgaaggtctgctcattgagtagtctatttcctgatatttgcaactggagttagtcatgtgaattgctttggcccatggaaaagtagcaaatgtgacataggcggtgaactgaaaatcgcttggttttggttacttgcctttcttgatgctcttaggctcttgggaactctgcagccgccactgtgggaacaagccttggctagcctgttggaggatgagagaccatatgaaaagaggccctgccttgtcagtcattttggctttcctggctaaggccccagataagatagtgaggccatctagcttgtctatccaccagctaacctcatatgtatgagtgagcccagccaagaccagcagaactgcccaactgagcccagaccaaattgccaccccacagtgtcatgggctaaacatgtggttgttttaagccaccatgttttagggtgatttgtttcctagaaacagctaactgacacaaaagtgctttcctctagggaaaaagataagcttgtcatgggaaatataacatggttttggaaagcataggtgtttgagttatagcctacctttcattttccagttgtgtggccttgaggaatttcaactctttttgtctcaatttttatatcttaaaagtggagataatagtacaatcttgtatatttattataaaataaactttaaaaagttacataaaatacttgatgtagtacttgtgtgtgataggtgttccataaattgctagagactgtggaggtgaggtcaaggctaaataatagtgtcagttgcaataagagatgaaggatggtgctgtcaagtgcactgcattcgaaagtacaccaggagagtttgattctctttctacagtcttctggctggggaatctaggaaaaaggaccagactactctagtggtttggatttgtgtccctgccaaatctcatgttgaattgtaatccccaaggttggaggtgggttttggtgggaggtgattagatcattggggtggatttctcatgaatgtttggcaccatcccccttggtactgtccttgtggtagtaagagagttctcccaagatctggtcatttgaaagtgtgtggcacctccccctctccctttctttctttctttctttctttctttctttctttctttctttctttctttctttctttccttccttctttctctttccttccttccttctttctctctttctttctttctttccttctttctttctttctttctttccttccttccttctttctctttctttctttctttctttctttctttctttctttctttctttctttctctctctctctctttctctctctctttctctctctttctctctttctttccttctttcttttctttctctctttctctctttcttttgttggagtctcactctgttacccaggctggagtgcagcggtatgatctcggctcactgcaacctctgtctcctggattcaagcaattctcctgcctcagcctcccaagtagctgggattataggcatgcaccaccacgcctggctaattttttttatttttagtagcgattgggtttcaccatgttggccaggctggtctcgaactcctgacctcaagtgatctgcccgtctcaccccctctttctttcttgcttcttctcgggccatgtgatgtgcctgcttccccttcgccctctgccatgattgtaagtttcctgaggcctccccagaagctgagcagatgccaacatcatgcttcctgtacagcctccagaaccatgagccaattaaacctcttttcttataaattacccagactcaggtattttttatagcaatgtgagaacagaataatacgccatgattctattgtttataaacatccattacttttctaagaagttcatgaagaccagagccagaactttctagagtagaaagtaaagatttaagttaagagtcaggcaacttcagacacaatcacagttatacaaattaatgttggacaaagccactcactagagaggtccagggaggaagaccatctcttgaagttcatagtgggttgatttctacaagaaatggtgcctttcagagggattagtcatgggtagttcaatgtaagatgagaacgatgggcctataggtattaaatcaggtcccagactcagatgctcaaaggtaggtgcattaaagttctgctagttgctatagcaaacccaaaatgcataatggctgaaacataatagaagtattttcatttcttacttatctaaagttgttctagtcagcaagtggatcttccaacctgggatctttccatatgatggttctgccatattcaacatgtggtttgactgcatcaaatggagaggaaaagaacatggaaaatcacatgtgagaaattttatggcattcaccataaactggcacatgtcactgctatacacattcttctggccagagctcagtcatatgactataatcttaaaaaaaaaatcaaatgcgataaaatatgcaaaacaaaaaatttaccattttaaccattttaaagaatatagttcaatggtgttaaacacatttataatgttgtgcatctgttaccaccgtccatctccagaactctttttatcttgtatgattttgactactctaagtatctcctgtaagtggaatcatgcagtgttcatcttttagtgactggcttatttcccttagcataacgtcctcaagcttcttcccggtagtagcatgtttcagaatttcctgccttttaaaggctgaataatactgtgttgtgtgtctataccacgtttttgcttattcatttatccatcagtgaacacttgggttttttccacattttagctattgtgaataatgcttctataaccatgggtgtacaaataaggatatatagtcttgtgtgttcagaaagagaaaccatgttttgtgaactgctctcccgtctctgccatgcaaggtacatatgtgagctcatgggatggtcaagtgtgtgacagtggggatggatggggacagtggggatggatgggaacagtggagaagtggagtgctgcttccccagctaaaaagacagccatttctcagcttcagttgattggtgccaggtagaaatgccaaccagaggtggccaaaccttccaatttttaaaaagaggttagacatctgaactgacatagaaaatttcttgacttaaaaacattggtgatgaatttatgaaacaaacgaatagtgtcaagaagaatcaaaatccccttgcaggcccagtgtggcctgtgtgttttaggctgccaacttactgtgtctatgttggaccatgtgctcaatgggaaggacagataatttgataatgaaaaacaggcctgggaatgctccaggcagaagagtaaggggcagaaatcagcctggctcttggtaggacttcattccagcaccaactaggagctacaaagaagctgggaaagaccctttgatcagagattttccagaataccttcaaaaagcagcagccttccgtggccaagcaggggcagggggtgaggctgagaatgataggtaagaaaagagtgacatgtgaaatgactgaggccacgggacatccgtccacctgtgctcagccatgtcatgcctacctgtattgtcccagtggcactgcgagaggagccagggcgtcggctcggcacagaagtgatttcaccgttagtcacagacgccgcgggtgtttaccgctccaagacagaggctttgtatgtctatgtgtggacacacatttcctgtaacactgtgagtggctgtcaggtttggggtttatacaaagctgtggtcatgttccagtcacaccttggatgatttagaaagactgcaaacactggaactgaaagcctattattttcttggtaaactgacgttgacctcgaaggcaagtcatcaatgcctattcacgttgtacctaagtacaacagattctgtctgtctcatgttctcagtccatcctaatgggtccgtgacacactgatgggatgccactctgtgctaggcactgtgaggaatgggaagatcataaacctcaccatccctacccttgagggctttatgatcctggggaggatggaagaaatacgtagtcctaggaaaagaaaagctgtatccagtacaggaagggcatgtggaatgaggaaaggatggtgggaacggaaggagcctgaggcctggagggggattcggaggccccgacggaccgcactgtggaggagctttctgtagagcgcaggatccacttaagctccgcgtgtgtgtagggattgtgtgtagggatacggcaaatatcctgcagttgattgccagacgtacagatcgattgcaacttcagtcccttttagaaaacaaaaaagagacaaaggcatttaggcaggtgtttgggatgttttgttgaattggggacctgtttttatcaaggtaacgtcagttttgtggaatgtgatggtcacagacgtggtgtgttctggaggctgtgtggatgcgggaatcacctgctcccagcaaaggagtgaccgcttggcttggaaacgtaccagtgtcctttcctctgaacatttctcctcaaaaacatcagcaaagcccccagaaatctctgccaagaaggtctgagcaaaaatccttctaaggttctcttcatgatttatgttaaaataaaaaaatatgttcatccctgattagaaatattccaacctttttttatggttatagttccaagcatttgcgactacgttctccatttggcaggatgataagttgggaacggaaaaacatgccaactttggacaaaatatgattgtgtattttcagttgcaatccaaagtcacaatttggactatgaagctggttctatatctttgccaagttgggcaaggaatcttggcggaaagatgctttttaaagacatggagtgttggactagatgtcaagacatttgtatttgggcttctttggtgccactgtttgagaaagcaaaggcaccctggctttgctatttctttccattttaatgtagaatgatgcctgagtcctcttacagaatgttgtatggctaaatcagaccttcctttagaaatatttagaatccactctaagttggctatctaaaataattattaattaataataccacttctactattattattgctgctgtgttattaccgttttagctgtgattattgtaccaccatctctgtttattataaaatgagatgctcttctcactcgctgactggtatgttttccagacagaccaaaacagtcccagagaagttaaaagtgaaaataatttatgtcacactgctgaggaaactgaatacccagtggtcaagaaataaccatgtcaaaacttctaggaaactattaactaataatgttgcttcagaatcactgagtatgggcactccttgatacttttcaccctagcatgggctttagatgtcaatattctgatttatattcaccttctttagacctacctaaagctgtaaatcgatgttttgttttatattatattaaccctacttagacctttctaaagttatatacataaatatatgattttgatattgcaattatgttgcaatagttgcactaatgcatgatagtgctttcctgaatcacaaattttgagacaaatagataattttaacaccaactttttctgtaccagctactttaacacttttctcctatcaggctcttttgatagaaaaatatgaaaaatttaagaatgtctagcatacacaaacaagctgagctgttaaaagcatgtcaactgagaagtcacacacagtaaattgcaggtggcaaatgagtatgaagtacatgggcagaatgagaagcagcaatgccaccttggctgggaacttcagagcagtgcagtaatgtgattatagtaatgattcaacaagtcatcgtctgctgcctttgtccactgtaattaactttttggaactgcgcagcctctgtctctgggctcatcagctggcctagcttttgtgtccccagtctgttatttctgcccaggctcaggagcctctaagcacattgctaaatgaattcattgctggaacaaagatttggtggtcgaatagagatggctatcttttgttgtcagacattcaatcccatataccaatccaattacttaagctgtttctatcagtcttattagggctggccattgaggctggctagaatgctggtcgctgtgtcttggaagaatgtggtggaacagattagcgctttaatgagaggctttctgaaggccagatcttttcccttgtatatatatcgagatctaggaatcatttttaggcgagggcccagagtcattgttacaaagactgatcaaaggatggctggaaatctgtacgattgcttgaagaaattttatgggttataaaatattggcatgggttctgtctgttatgggctatctgatgaaaatctctggtaggctgggaaaaggaaattgcttattggcatttattctgtgggatggatatctttggagtttgcatttgaactctttcttcactgtgttacaggtcaaattctgtacttagtactaacattccaggaatgtgggctgcataaaatcaacataagccttgctccatactttgctacccagaaaagcattatgagagagtggctcagacaagggtgaatggatgattactaagaaaagatagcaagggtggagtgaaattgcagtggttaatgtgtagcagttgaaacctaaagttaaaatctgagtgcagttaagtcaaagaacttagaacacccttgctctgactatcaagaaaaggtggtaattggttttaatgttcaaagaaacactattcaccttctatgtgttatgcttattgctctggaaatgtttctgaaatgtcagatgcaaagagggtttatttcattttatttttatttatatattttttgagataaggtcttgttccgtgacccagactggagtgcagtggcatgatcatggtacactgcagcctcgacttcccaggctcaagtgatcctcccacctcagccttccgggcagctgggactataggtgcatgccaccatgcccagctaacttttttgtgttttttgtagagacagggttttaccgtgttgtccaggctggtctcatactccagggctcaagccatcttccctgcttggcctcctaaagtgtgggaattacaggtgtgagccactgtgcctagcccaaagaggttctattttaaaggaaggatatctactcatacttggaagattgtaagccaatagaaaaatatttttttccataaaatattgtcttatagaaacttttaaacagacactaaagtaccctttaccagattcaataattaattatagttaatcttgcagcaaaactccctaaccttcctaaacaaatctctgacttcatatattttatcgattgctattaccttctaaaaaatgataatactttaaaaaagcataaactgcaacaaaattatcataccttaaaaatattaacaataatttcctaacatccaccaatattcacgtgcgaaatttctcatcagaagaagatgtagaggctgggcttggtggctcacactggtaatcccagcacttttgggaggctgaggtcagcagatcacttgaggtcaggcatttgagaccagcctacccaacaaggtaaaaccccttttctactaaaaatataaagattagctgggtgtggtggtgcatgcctgtactcccagctacttgggaggctgaagtgggaggatcacttgaacctgggagacagaggttgcagtgagccgagattgtgcccctgctctttagcctggaaaacagagtgagactccatctcaaaaaaaaaaaaaaaaaagataaagaaaaagatgtaaacacatttggcctattttttggtatgcgatattttagataattttagatcataaatgcccttttcccaggaagttgtttcttatctttgctatacaaacttattccagattctataaggacatcaaaaattagaataagggtacattatatttgtatgaaaaaaatatataaaaaattaaacaatatatctttagtaaaaagaaaaatctttcatgtgcacagatgttttggtttttatgttagcctctgtgagacagctggatatgttggaaataaagaaataacataacagatacctgtgcttcattcgtttgacctcagcatagtattctttctcctttacccttgatgttcactctctctctttcaatataatgaagtctatcaaaatataaaattttatgggctttggaaatagtctgagattcaaatgcagcaggatttggtcatggattcaaaaataggggcttgagacctagagatagctattttaaatatataaggccattttcctaaagtgtaggaagaaaactgtgaggagagcgttcagctccctcataagctaagctagtttcataccttctgaattggtgtagatcaaatactgaagtaaaatggtaactgaaatgaaacataacagaatgacctcattcaagtcatgagtatggggtggggggtgtgtatgtatttctgtatgtatctgtgtgtatgtatgtgtaagtctgtgtgtgtgtgtctgtgtgtatgtgagtcatctgtgtgtataggtgtgtgtggccacttgtgtgtatgtgtgtgcacctgtgtgtatatgtgtgcatgaatgtgtgtatgtatgtatgagtctatatgtattgtgtgcctgtgtgtgtgagttagtgtgcatctatgtgtgtaggtgtgtgtgtgtgtgagtgtgttcaaagaaaagcaaatagtctcccttggattgccccaataccctactcatttctttataagataaaaccacaaaaactaacaaatgcagaattctgcttttcactgagaaacgcaaagccactggtgcctgctttctttgtttaaaaaaaagagttagaaaggtcatccaagataggaataaatggaggcagaggcaaatcaatgtttaacttggaaatatttttcagttaatcatctctgaccgctcacactaagagggcactcctagagtgttggcaaacgtgaactggaagtcactaagctactagtaaaacagccagacgtcaggatccgtataatcagaaagcctgaggctctgtaggtttaacctaaaatggcgagaaaaccttcttctgaaaatatgatctagaaatattttgacttctagacttttgcttccaagtatgaggattatgaaaccataggactttccttgctttaggattataaaaacctgggactcatacctggtaggaaatttgttgaaaggtgtgggaaatcgtcttggagtctgtgatatagctttctctccctgttttcttttctggcatatgtaactttataaaatgctacagaatgtgacttagtagctttgtggctcttttgttggcttttttggtcattttgttataaggagcaatctttaagaaaggtatggaaagcatatggggccagtggggtcaatatttgctctaatgggcaaatagactttgttagtctcatttccattttttgtgtgtttgtagatggccagcgatgaggacaggctatgattttgacaggctttgttcattcttctgtacgggtgaaataattatctgtcaaacaaaagaagtaactctttttgcctttgaatgtgacatacccattacattcatgtaaagtcgagtttgtaaagagattcttagtcaaaatgtcacccttgacataaggccattgtgcttgtgaactgctgagcatatggcatgcttgctattctgcgacccactgctccaagagttccctgtgccatggacatttctttacaagaagagagtaatgcaactggtgccaaaacgatgaatattctaagaccccaaagatgcatttcttttatgagacctgatctttctaacatttggattctagacacatgaaacagcttgcaataatttagcagcagtgagattcagcagagccatatttgaattattggaaaagtctgaattttggttttgcatttagggagccttaaaagatctgatttgtaaatgcttttgaagaattcacgtggactagaaggattttacaggaaacatgaaaaaaaatgccagattacatgtctcctttatcattcaaaagaataaagtctgtatctgttgtgttccttttgctttttttaaatttttttttattttttgagacagtgtttccctctgtcacccaggctggagtgcaatggcactatcttggctcaatgcaacctccgcctcccaggttcaagcgattcttctgcctcagcttcccaagtagctgggattacagacacccaccactcccagctaattattttgtatttttagtagagacagagtttcactatgttcttttatggtgaatggacagcaagaccttgatggaacacacacaaaaaattcttcattaagttttggcttgggtctttaatcttgcaatgcttttaaataacattgctttttgttattaactattactttatttggggcctggatatcacttctccttggccatcaccttggtccaccagtgctgggagaactatagggccatgataaaacccagtgaaatcaaatggtaagagtctgcccatgggtttatctgccacaataacagatgtattttcttcctatgaaggaattgttttctcattcaaacttgcctgaagagaggacagatggtaggtactctgccttatgtgtcggttagcactgttacataacaagctaccccaaactctgtggcctaaaacagtaagatttattgcccttggtttggctggatacttctgacactggccagctcactgtgagtctctagccaactgtgggacagatagggagctctgtttttctaggctgggctctttcacacgttcaatggctggctgactgtaggctgatttaaggtcactttgaatgggacaattggaatctcttccatgcagtctcatcctctggcaggctcttctgggcttgttcccatggtggtgacaaggatctgagagacagaagcatgcaagacttctcaaggcccatacttggagctgatgtgctgatactttcactgcaaagttataagcaaatcacaagaccagcccagactcgaaagggagggaagtagaatcttcctcttgacgggaggatccacagaatcacattgcagaaagtgtgcacacaaagcaaccattacttcgcactatgaatgcaatcaatatacttcatcttagttggtaagtaatcttcaataaatctagggatctctgatccaggtgaaagagctgtgatccatggccaattgctcataccatatttctcaaaatgtggtatacaggtatcttctgcatcagattcgcctatgggatttgagatgccctagacctactgaattattatagaatctaattctgggtctcagaaatctgcttgttaattaaacttcttccccaactcccaccccataactctaatattcaggtttgagaatttttgtattagactcacctactcaacgcaatcatcaaaacatgtagattcaagtaatagaacatatttttcgtatctggaaaactaactctgaaatgaattacaaaaaatgtagttggactatttcagtgaattgacttaaacaaattcttaccttctcccaagttatgatgaatatgttatgtcatagtggcaccagattaactgataaactcatattggaaaaacaagtttgattgattgcttttgctttaataaattttcacttgactagaaaagaacacagatatatagaagatataagttttgtccagtgcatcctagcaaggaagcaggggaggaaaaaagatgtctttacatctttaaaatccttatcttaatcttgaactcaaaagccttccataggagtcatccagatgccctgcaggtagggaccagctctatgtgtgtgtgtgtgtagctctatcttttcattaaaagcttcttttgagtcactaaaaactttagatattctggaagattcttttggggtcaaaaaatattttaatgagagctagaagaaaaatctgaaaggggcaaatgaggttttaaacaggctagtactaaactagtttcttagattctagtctttactgataccaactgagcctgcacagaggaccagattagtcttttgaaagcagtattgggtgactctcattccttgcttgaaaactgttaatgatgcttgttgcctcactgggtttgcaaattcaaaagcatcaggggctagggaaagaagagtaagtgagtgaaactgaatggttatgattaatagggggtggtgaggtttctggtaaactaaaaaatgcatgtcctattgagaagcagttaagtttagatttgcaaaagaaaaacaagacctgctcaatggaacacatttgtggctaaattcagctcttaggctacttgtgtgttacctgtgggctggctcaagtccagatttattaatctggcatttgtgattctgtacaacctaacatagtgctgtgaacagaacaggactctttactctcatttttaatacagagaggtggaggagaaatatcattaggctttgggagtcttgggactgaattctgattccaccactcactgcagtagtgtacagcctcagatgactcattttatctgtctccgaggcttgtttgtttttcatgtatacaatgtgggcagtaatgcctgccctgctttgttcatgtatttcttagaaaaataaaaggatgccgtttagagctacagcaccaatactgcagccactggccatatgggactactgagaacttggcatgggtctagtgtgactgaggaactgtattatttaattgtgtttaattttgattaacttaaatttaagacctgcttgattcaggtctttgaaaacttttaagaatgcctgatacaacttgaatttgccaatcttctttttaaactgtaaattttaatctaaatatagatcaaatacttctggtgaaaatttaccatctgaattgagatgtctgtaaatgtaaaatacacactggattttgaagatttaatataaaaaagaatgtaaaacatatcaataactttttgtgttgactatataactttttatattgattattttaaatacattgcattaaattaagtatattattaaattaatttcacctatttctttttacattttaaaaaatgtagccaattgatttggactctcacctctggagacaggactagaaatataaaaattacataagtgactcataatacgtttctactgaacactagtgatctatatgaaagcttttaatgaactatgatgttattatcaataaattccacaagtaggttgcaatatctgtgagcgtaaggatcatctactattatttctactttatttcccatcatatatttagggcctggcccagtgcctggcacaaagtaggggcttggtaaatattctgtgaacaaatacttatttaaataaatttaaatagttattaaatgaatatgtatccaagctgtgccattgtttgcattgcctattaaatgaggaggctataaaatgatatttaagttgcttccagctctgaaatacaataaaatctgacatgacaggataccatacaacaggatgcagtattctttcactctatttgaacatgtgtagtcttttttacttggctgggctgctgggattttgctatagtctctttacacaatacatgccaatataagaaagagaagcaaatctttcttagatgacaaaatctaactcatgctgccagattctgattagtgataagggaagcaagactggccatatcagcaactatatgttggaccttatcactttgtttttatttttgttttcaatcaaactccagttttattagaataatcctcactgcagtaggcatgcttgcctatagattgcagaggttttttaatgcaggtggggattccacaccttgaagtgagaatttgcctcttgggaagtaacgagctctcctggagaatgaattgtcacctcacattttccatctgtcctcaaagaagtgtgtttatttttagcgaacatgataaaccccagagggcataagtgatagattcccctaaccagtaggtttcactttgtttcatttcatgtgaagcagaagagtattctcttgataattaacctatcaggtttctgagatgcctgcagctcctcttataaggaaaagtgtttgtgtgtaaattatctatataatatatgcaaaagtgtttgtttccataggaaatgttgcgatgcaggtttttttttgccatttataaaatgtaacattttgaaagactttcatttcatgaaattaaaggtgggaaacttcactgtagagtacaatttctttggaaatgaatagcaacttgtcattttcctttgcttcttggtgatggaaattgtgaggattccaatcttttcccctgagagattatcttcttttggctgccatcctaacttttgagatgtttactctacaagcaatttaaacaaaagggaggaagtgccctggactaaaggctgtatgtgagcataatgaaaaatgcttgatactgaatcacaggagtggaagatggtgtggtgacttctgatttggaattgcacctctggagacaggactcttttgaagaaactgggataaaaggaaagcctgttgtgacaaagctggcccatttgtagcataggcattttcccctttttcccggcgtatgagatggtcaccctgtgaaaacgcctcatgactgctaaagcaatctagttttcttctgccctggagtggtgtcagtgaattaagtttctgcaatgtaacttagagaatacgagaacgtcggagtgaaaattgatttaggcaagattcatcattggatgctaaatctagaggtacagattaaataaagagcagaatacttaggccagatgcggtgactaacgcctgtaatcccagcactttcagaggccaaggcgggtggatcacctgaggtcatgagtttgagaccagcctggccaacagggtgaaaccctgtctctactaaaaatacaaaaattacctgggtgtggcaacaggcaagtgtaattccagctactcgggatgctgaggcaggagactcacttgaatctggaaggctgaggttgcagtgagccaagattgtgccactgcactccagcctgggaggcagagtaagactcaatctcaaaaaaaaaaaaaaaaaaaatgcagattacttacataatttcaaggtatctaaaggtaaagaaggaaaacaggtctctatgcaatgaagaagtggggcaagatcttcatcaaatcatagaaactaacatcacaaaaacgggcaaattgggtatcagaatcctgagatgagacttcaggaagaacacatcattatgtagtattccaggcccaaatttgatatatgaacctaatcataaggaaatgttagagaaatccaagttgagaaacattctataaaataactgaaaagctgaggaattgctcccaggttaaaggagactacagagctgataactgaataaaatatgtgattatgaactgaatcctttcagagaaataattgttataaagggagttcttggggacacatgatgaaatttgtatatggtctgtaggaagaaaatattacatcgatgttaaatttcgtgaatttggtaacagtactgtgatatgtaagaggctatccttattcctatgatatacacatggaggtatttcagaacaaggacacgttacatgtgtcctagagtcacatggtccagaaacaactgtctgcgactgagtgtatgcctggatacacacacacacacacagaaacagagaggggtttgtgaaagtgtttctgtagatttaaaataatttcaaaataaaagttttaaaaaataaagctaatactccccccccccaacacacacacctcctcacatatgcatgcatctggtggtgaaaggttttatgagaggagaatttagaatacagaaagtttgaatattgggagaaagatttgaggaataactgcaaaagcaccttctcataaatattgttggaagcagtccttttacaatgacagactccagagattttatgtccatcagggtaatcccattaaagaaatttcagatggctgcaaagctgtgagagtccaggtatagggtgatgaagccctggttaggaggttgatttattggctggcttaacccatgcgttacttggaacctgtggagcagtagtctgggtcaaacctgggtgccctgcaccatcctcagagagggaagcagtgatgagattaaacccaggaaggaatacattccccatcctttaagtgttgcattccgggggttgacagctggctatatatcttctcttagtagcctggaatatctgcagtggctgaacgtcaccatctcatatgaagcatgtgaaggcatgttagttcttcaggcaaactctcccaaccaaatagtgttgattggtgaaccatgagatttcaagtgtgcaagcttgctcttctttcacacttagggctgagacaatgcacctatatctgctgtgtacagtgctttctaggaagggtaggactcactaatcagcccattagggtagagagaatgaagctgttgttttaccagtctagagaaaaatctcagtgggatctcctttaacgaacaccagtaatctggtggcacaccaacacacagttagctctttatacagacatttgcaatgcactaggaagcaccctgtggagttacataggaaggaaaattcagccctttattacttaatcacatcactcaatgttagaggttttcattatctcataaaatgctttccaggggtagagaaaggtggtttagaagaaattttactgacttgccttgtttccaattttgtgagctttcagaaatacttgttccctcttatacacacacacacacacacacacacacacacacacacacacagacacacattttaaaaacatgacttttttgcaggattggtttattttcaaggccattttgctttgttctattatccatatggtttaagaactattttctgtaagggtaaatggcatagagagctgtaaataatcaaagtgtatttgattacaacagtaattgtttcacagtgttgtagatcaaaaacataacataggatggagccagtttcagatctagcaagctttcaaagctattggctttaaaagaatgaggtcctaagactagggcttctagttttcaaagtgctgtgcagagtttcaatctcatgatctcttatcaactctgaaaggggacacctttgttgtctttgctgagtaacagttaaaatttttccattttaatttcaatggatagcattgttattttatacaatatgaattgttttatgaggggttagctgtacaagctggggactacaaaactctctacttatttacttagtacctagaaaagaagtaaaggaacagaaggaaaggatttttttttttttaaacagagaagagatcagtgacacacctagccacaacttgaggcattctagtgggggttcagtttccacgtacatgacttatttggcagagcaatatggtcccaaggtttctgattcaactgtcttaaaaaaaatttatggctaaaacacaaaaatttctgagtgtgggtgtgggggtttttaaggcataactgtggcggagtcaaaagctttttagaagctcagcaattaagacagattactgagatctctttctgaacagagatgctgtgatctctttggggaggacctgtctggggaggaagctggaggtttcacttcagtgcagagtgaactggggcaaccatcttgcgttcttgagatgggactgccctccagcaggttttctaacctagactgcaactttcttgtgagaaaaggaaaaatattctttgggctacgggccttctttagctagtggtatgttttgagatgcgtgtgtgttttagattgcaagctttctaaatttcttttatttgtaagagtctgtgattccatgtgtgtctttttagtttggcaggagcaagtctcaactgagaaagaagtgaacagaaggctttctctttgtagacttccgcatgagatcaatttcttctcagcccactgttcagagcaagaacagaaatggaaatagttctctttttttgctggcaaccaggcaactttcccttgggacaaaaagtatcaaggctgatcctgcatttcctcaacgtggcagattgactttggttaaagagtctagtgaaatttccctgtgtgaacactagatccattagctttcttccccaaaagctatttacatgcttgccctgcacatgtctcttgtttgtcacctattttttttaattgcaccaagctttggctctattttaaactatgtccagccatttaccatattaaggaaaaaagcaggtatttatctcattccacgaggtgctgattggttgtaaaatgtccttgtaaaatctgttcttgctgttaacctcatttgtatgaaggaaaagtatttggaatttgctaaaattgctgaacaagaggcagagcagtcacttctgtagcctcgtgtttgttttatgagaaaatcccgagcctctaaggaccttggtaagtctcctggtgggttcctctggctctgggtgaatcggccacttgacatggccgtgcgcattactggacttttcctgtctcatgcctctcctgggagggagattacaagacttctctttgtaacctaatatgatacatatcaacttatacatcaagaattcatcctaaaagctaagctgacatctttctggactgacttaaagccaatttttggttgttttttctttggagatagagaactttgatctaataacactccatatattactcaaccaccctgtggggccaatctcagttcctttaaccatttattccccttgcgccttcccaaatgtgtaatccgtttacattttctcttctctaagtaatatattcttaaggtatctgtgactcatttttttttgcatgcaaaatgttgtgctgtttctgttcatgcttccacagtgaccttctttatccacgtgccaaccgtgccatgtttagccaggccaagagcatatgtggtttcctttgatggcacagccctggtaacagagacagccatgagaaacagaaagagaatagaaaaaaggatcaggctgtgtttctgtctagaacatagatcagactaaaaagtattcaataagtgaattctacataaataaaatttcatttctatgtcattttccttgctgtctataccacctttattaataattagaaagctttcttagtgggatattttgaaatttaaaagtcatcccttttttaatatcttcagaataataaaatacattataactagagatttttacgctaattcaaccactatcttagggtcgaaaattggcaatttggttgatctcccaataatgggcattgcccagaagctattgtgttccccaaagtaacactgataagaggagaccactcccagaatgccatgggccctttcacttggaactagcatgggtgtaacttctttacttcctgaagctatatcagttacaaatatgtggaagcagagaagattaagctattatggagaattttcttctgaataattcatattatttttcctgggtagaattgttcattcccagctccctcccttcagatacgaactaaattttgaaagttcagtacatttttttctgaacatagaattctgaccatgataataggttctgggaacgatctgagttttcagtattccagtgaacaggatgtaataaaaacttcataaagaaccaacactttgtcatgtacttcgaacattgtttcactaatagtgattttctagtttttagctcttgagagcaagtaacttatcatcttagcttaattattcatggccctaaaataaaacaagaacacccttccaagtcatattttagtaagaattgtcctaatctcaaaatcccatattttaaatcagtgagattttaggttttgtcactttcatggtaagttttttttttttttttcattctggaagctttgccatcaattcattttctgcatgatctggttttcgattgtctttgttaatgcagagccatcttgctcagtaagaaatgagcatgcaaggacccaaggccaaggagttgatgttatttaagcctttctggggcagaagctgtttagaaaagcctgtttcccttgctaagtaactcatctagagtcgtgggtagttctcttgttgtttccctagtcaagacatcaggttctttactgtctcatctacatcaaataaaagcttgaatcttgcagaatagatggaatttatttagatgtctgttacttcatatttatgtcctccctcccaatggctataacaatccttagctttttgtgacaaaacatgcacaatcccaaccctctctttcttctttcttctttccctcctttcccttttggaagggcactcttagagagaaggattggtttttagactaccattgctacagtctgaatgccttagtgggaagggttgagaggactgatttaataactcaagtatttattgagtgtctactagatgctagagattgaggttacctgagtttggcttgtgcatctctcacttccagaatggcagcagtagggacaaactgaagtagtgctgttctgagcttgctagtgtgcaagtgttattaagatgacttcacaatggcaaattggaatagagtacttgagacccagctagtggtatctcttaggctataggaaagaaagcagagaaagattaagagtgactgccatccaagcatgggggaactccaagttctctttgaggaagaaaatagaagcatgtatggaccagggcagttgtttcacctggttgaacaggcttcttggtatagacaaaggcaaagcactcaagaagacatctgtctgctgctgaggtagtgggacagacagggcataggggactcttttttacttattttgcctcaaatgctataaccctgcaaggagaaataaaagctagcattcgtggagtacttactatgcggtaggatttattttcagccctttatatgtaatatctaatttaaacctcatagcaacctggaaaagcaggcactattatttttccgaagaggaaactaaaatacaaagtgtttgagtgccttgcctaaattcacgtagctagcaaaagatggagccaggcagtcagattccataggctgagaccccttatcagaaaattggactccttgggagcaggtttcttgtgccagaaactgcagggaaaaaaaggtacagaatctctaacagaaagttagtttctgatagaatttagatgattttgttagtttgtctataggcatggaatcatttgatatagggggagggtgcatggtcatatttgatgagcacacacatttcttcaaatttccccaaatttgctcagagtttggaaacttcagtccatgaagctcttgtaggtagttttgttcttttagaaaaactcattctccagagctggcaaagcagagccctggagctccccggggacagtgggaaaattttttctcttaagtcaattgagctaaagcaccagcaaagtggcattttatagaagagccttgatcaaagtcagtaaagctgagtatatttccttaaacatatctttaggtaaacagggaggatgcaataagattttaaaataacacagttcagtcagtgaaacaattgaagatacccatctgatttaaactgaattcagcaactgcaacaatactatctgatgaaggagattttgtgtcacatgttcaaagctggctttaagtcttaagaggtatcaaaataatcaaagtgttttctttgcccttagccatcaatgagaaagaattataaatggttgaaatatttatgttaatcagaaaccgcagttgggaagtgaaaagaaaggctgtttctgagcagaaaacaaggaggagtgaccctgttattacagcttctgtcttagaacagttatacactctctgcttcagatcctagctccaggatatcccaggcttcttggaggaggccttttaatgtgaggggaatcagaattgctaaagggatcctcaaacttcatgaattaacctaatcatctggagtgattttttaaagatacagattccaggcctcccttggaacttctgctctaataggttcagattggaatccaggaatatgaataacaagtctccccgtatgagagtcctatgatcaatcaggaccgggagccacattttggtgtacccattttacagatgagtagactgagacttggcaaggataatttacacgcttgatcgctgctctagatgtggagctgagactcgaatctagaatctctctctctctttttttttttgactctagattgagtgcttttaaaatgtctttgggtacatgtgaattgggcagttagagatgagtgtgtgtgtgtgtgtgtgtgtatgtgtgtgatatgcagatacataagggtgaggacctatcagtaaaaggtgttaaatattgaactattaataattacactataattttaagtatggtaagatgagcaaaaatctccaactcttggaataaaaacgtttatcccatgaacatataattatttagtacctagtcttctgggaaaggtaaaagcacaagaaagagaaataagatacactttcctaggagttacttcaggacaatattctaaaatactttgtccaaggcttacattcacatagaagaatcatacctgacatcttagaaaagataattagacaagacagcgaagaagtgtcatatcacttgtatctcctcttcccagtccagtaggcacaaagcactctcctgttcacttctgctttttctcccattagattttgagctccttgaggtaaaatatgacttggaaggatgttcttgttttatttcagggccatgaataattaagctaagatgataagttacttgctctcaagagttaaaaactagaaaatcactattagtgaaacaatgtttgaagtacatggcaaagggctggttctttatggagtttttaaagagggtggggattgtgcatgttttgccatgaaaagccaaggatgtaagtattcctacttacatccttaaatgcctagcccaatgtctaacatataatactagtgatcataataataatttattgagctcatatttaatttaaaaatcttatgatataggtaaggttttaacccccatatcatacatgaggaaacagatatgcaaacaccatctggtttgtttagtgagggtagaggaagctcaactttgttctctgtccaccagaatggacaaggagggggttcaggacaagttaggacttttgacaaggcctggagaatggatacaggtcaaatgaggaatcggctggggagtcatgctccctgccagaaggaaggaatgctaatatacttgagaaggagggaagaaataaaggtaagcatgcttgagtatcaggtgcaggtttgtgtcctccatgcagggttgagaagagaggcagtagaaaccgtggttagaaaggtgatttggggtggacccaagaatggccattgatggcctttgtggacgaccttgaaacctgggctgagaaccttggcttttattctgtccacattggggagctcccagaagctttgaggaggggtgatatggcttggctgtgtccccactcaaatctcatcttgaattgtagctcctataattcccacatctcgtgggagggacctggtgggaggtaattgaatcatgggggcagatcgttctcatgctgttcccatgatagtgaataagtctcatgagatctgatggttttataaaggggagttccactgcacatgctgtcttgcctgctgccatttaagatgtgtcttccttcccctttgccttccgccatgattgtaaggcctccccagccacgtggaactgtgaattatacctttttcctttataaattacccagcctcgggaatgtctttattagcagcatcagaacagcctaatacaaggggaaacaatgtcccagaaaacggctattctaggatggctgtgtcaagaattagaaaaggtctgaggcaccacagctcaaagtccctattcaaagaaataaagacgtttggagaaagtaccaattaaggaagagaagagacgatgaatttatctttgtatgtgttgagttggggattgagatgcccaagtcaggtggccatctctaccaggcagttggaactatggggctatggagtgagcagcagaatgggactggagtggatttttgaagttggtaataaatgagatctctgagtagaagaataagaaacaggaagagcagaattccgggaccaaatattgtgcacctgttctattcggggtcaggaagaaataccaaggcagcaaatgggcaaaacagtaagtggaatctggaatgtaatgagcttctgcattttattaaaaaataccctcttgtatatgattaactgtctcatgtgctcatttctcatgtgtgtgtttatccagtgagtttttcttcccaacttccgacaagacacttctaccacgctgcttgccaactggaaatcttgccaggaccttaaacttaatatttcccaaattgaactcggcttctcaatttccaaacttgtcctgtgttctgtgtcctctattagtagtgacaatttcccatctcccaggctcaaacgcttcaactgtattccacttttttccaaggcccagaaggttgacctcagtgctgcttgtaactgcctggcctcccctcccacaccgctgtacttgagttcaggcccccagtgcctctacctggggatgttgcactaacctcttaattcatcttctcaagtttgcactctcctcactctaatccatcttaaacactgcggccaccagactcatcttttggcatctgatctcttgactcacccgatcctcttaaagatcttgcatagcttctatttgctgacagcagtcatttcatatttggtccctcatatgaaatcttgtccaggaactctagtatgtcaactagataaaagcagactgtcccagtcacaacagggtagtatcctggattgtccccccattctgttttcacaacaccaagagctcagcaacatagattttgaagacatgccagcttcctgagcctcatagtaatggaccccccaaattaactcccattgtacttttcccatctatggcccattattgccaactgtgtctcctccagttgattcattgtggaacagttatttccatcttctgtctttgcttccccactttttatcctttgcttatttgaatagaattctcttctgtttagaaagccctcccttcatctgcataagtcctaattctgtctttcaagacccacctcaaaggctttctcagtgcagagttcctgcctcagtttgttccccttaatttcaagtactctctctttctgctcaacccctcattgcttattatctgggtctctcttaggcatgtatcactttctgcttcgtacgagaattatttagtgtcagtctattctctgcttgtagacttgagatcaagataattgatcaacttgcccttgtattctttctcaaggattggaacacatcttgagcttgttgctcacaattatttgcagagggaacacgagcttcttgagcatcatgaaggcaggaatgaggactccatcaccattgtgcatttcctgtcatgcagaggtcagggccaggctgacagcagacctcataatgagcataaaaagctggcaggcattttgttttgctttgcagctgtaatgtgtattctcacctgctcagctgccttttgaaagtcattgatatagaccttcagagccacaaaagaacagttcgtccatctagtatggaggtgaggagagcaattaccctgattctgttcatgacgttcataggctaaaagaggtaaaatgcatttcagataattagaggcaggctcttaaaatgcataataataatctttgttatgcatcttctacccgaggtcatttttccagtaagtattttatggcatgtttcctttgaggtaatttgctgccgcatgccactgtctttagagcggatcttctgaaggagcctgaaaagaatctaaagtaacggtttagaacttttatagttctgtatctctagtgaggtgcataaacggtttgagttgaaagaacttggaggacggtggcaataagcttctggtaggggcagtaggaactctgaaggaataaattaaagtactagatgaactttatactgctcaactgctcagcatgagtcagtcctaacttcccagcttgggtcacaagtttatcctctcaaagggctgtgaaagcagccacaatggcaggggatgatggataaagttgtcctgaggaagggtgtgcatggaagttctgtttgggttttaaattccccaagaaggttcaagaatttttcgtagtctaaattcagtaaatgagaagaaaaagcaggggatggagaggctcacatcaatcatttgtcttaattgtatacatttcgatatcacatagagaaagtttgcttataagtataaaatcacaaggggaaagattttttgattactcgattgcaaaattaaaaagtatatacatatttttaatttaagtgttaaattcaagttccttcatatatgtccttctcttaatgcacaaaggcctagagctatgcctgttagaacatgttgctaatctctcttgcagttgaagtagctctgagttttccattgataagaaaaatcagatttttaaaaaatgataactcgttgtctttcggaaatggaaactgtatgcatagttcctaagccaatgatgtaattggacattttagtgtaattgctttgattctcatattcacagtagtcatatgttaaatatgggctcgttcatagatgttataatgtaagaatgcttaaaaagaagacctaggaaataaaatatctgtgccttggtttgaggtggaattcgaagctccccggacatttcacatagaatggattcacaatgtttatctcaaacactatgtaatataaagcagggcctaagaactttgctttagagttgtattgcttggttgaaattccagcttcaccagtttagctgtgtgaccttagtcaagccacttaacttctctgtacctgtattttcccagctgaaaatggaaataagcacagaacatgtctgttttagtcagcttttattacagtcctgctgtgtaacaaatagccccttccctaaacaaatttagtgccttatagtcacagatattttatttctcctttaattatctgtaggtcaagtatgacaactctgttactggctgacagttggattcaggtctagtccactgatatgaggctgagagagcagtggttctctgaggccaatgtgagaagcatgaaagaatgaactgaaccatttaacaaccaaggcagaggctttgcttgcatatatttacatttcattggtaaagcaagtcatatggccaagtttaacattgaggggtgggtcatcatgcttttcccatggaaggaggaagggacagtgagtagttgctgaacaataacatctacctcactattctggggttgctgtgagtgataactgatgtaatacacatttgcttgtgtcatagtaacagatcaagatgcatttctcattattattatgtcttacaaaaaaggtggtgccataaactgaaaggaaaacaaaggacaaaaggacctctgagaacccagtcaggcattactgatattcatggtccaacttgccccgagtctctcctttattgccagcttcttcctctgctattgtagaacctgaaggattgttagcaatctgggaacagaggggagaagtttatctctctcttctctctctcttcctcatccaggctgatgcttagttgagcactgacaactcctttcataatggtccaaaagtgtcacaaatttgatttctgggggcctatggtagtgagtcaagaatcttaggaagtgcataacttctattaattttctcctctcctctcttcccctttcccttccctttccccttccccttcccttcccttcctttccccttccccttcccttcccttcccttcctttcccttccattccattcccttccctttccctcctctcccctcccctccctcccttcccctccccttccttcctccctttccttttcccttcccttgccttcccttcccttcattcctttaccttccctctttcctttccttccttcctttttcctttttcttttatttatttatttttaaacaaaatgaaatttccatcaggcgaatagattatatcacagtatttactatcaccattaacccatagagtgagtttggtttggtgtcttggaagtaggtgctgagacagagtttggtaaacaagatgtttactaagcattaatgcccatgaaaagaaggggtaagaagtaagattgggtgttataagtccgatgaagcctcaaccaaccagacatagactctgaagccagcatagccctccagagctgtcctgagttgaattgagatgactaatcatttaaatttctgaatagatcagtcatttggtgtgggctgcccaagaacggacgtggcttgggtgtggtgactgtggaaaaggcagaccctgaaggagctggcagctagaggctgcatgcagattgtacacctacaactgggcagcaagcctttcctgaaaaggaatctgggaggtgcttcccatgtcgaccacataatctagctcattgtacacatttaataaacgttagctgttattattattgctatttatccttgatgtctgtatatgtacattttttctatctcagccttctttctgtccccccaactgcccctagatgacattattttcctcccatgcttggcacaatccctaagagagctgtttttgatgccaagggctgtgatggtagtaagatccatccggctcctttggctctgagccctggagaacaatctggctcctgtgtttactcttgagttttcaacctcagcttatccaacctcaagcagggatggaggagaccccagcagaaccccaatgtccatcagacttggatctctgcccaaagtctattataaacaataccataaagcctctaagatatgattctatcattccaagaaggagtcttagatattagaaaaactaggctcatatcttttttttttttttttttttttttttttttgagatggaatctcatctcactctgtctcccaggctggagtgcaatggcacgatctcggctcactgcaacctctggctcccaggttcaagcaattcttctgcctcaacctcctgagtagccgggactacaggcgtgcaccaccatgcccagctaattttttatttttagtagagacggggtttcatcatgttggtgaggctggtctcgaactcccgaccttaggcgatttacccgcctcagcctcccaaagtgctgggattacaggcatgaaccactgtgcctggccaactaggctcgtatcttatagaataatggaatgttgaaataaaagaaaaattaaaatcagcttgttcattttcttcctcttaaagttgaggaaaccaaagcttagagagccacgatatgttctcatttactcaactctttattggcaagaactggggtggagcctggaatcttaggccagtcattttccatgtcatcttacaatatgcagatagcactggcattttaaaatgtagctcagagatggaattggatttgctgggtgtggtggctcacccctgtaatcctagcaatttgggagggcaaggcgggtggatcacctgaggtcaggagttcgagaccagcctggccaacatagtgaaaccctgtctctattacaaaaaaaaaaatacaaaaattagcttggcatggctgtgggaacctgtaatcccagctactcagaaggtggaggcatgagaatcacttgaacctgggaggcacaggctgcagtgagccgagatcacaccactgcactccagcctgggagtcagagtgagactccatctcaaaaaaaaaaaaaaaaaaaagaaaaagagttggaattggacaacgtggttcaaatcctggctcaaacatttagaagccatgaaattatgggcaagggacttaacctatatcagcgtcaattttctcatttttaagaggctactttatagggtagttgtgagagttaaattagaaatggatgaaaagggcttagattctatgatgatgattttaatcacaaatcttatctgtatttagaaacatacagtgatgctgccttataagggagtatgtctgttatccagtaccacaatgatgcagtgtatcaataatgcaacacctcagtaacatacaaaattaaacatgtgtggctcatgcatctgtggtcagctttgtctaaactagccacctccactgattttgactgggcacactcacatgcctgggtgtcagctggctgttggctaatctaggatggcttttcttgggtcagttgcaatcactcagctctgctccatgtgtctctcatcctccagcaggctagcccgggcatgttcatggtggtggtagaagcacaagagaggaagtattcaggcatcttaaggtctaggcttggacttgtatgccatcattttttatttttttttattgtctaaaacaagtcacatgaccatctccagggtcagaggagaagggcactacaaagtcacatggtagaatgaaaagggcaggggaaaaagaccacaccacttgatgggagttgcagtcacatggcaaagatagtggacatagaaaggggtggagaattgaggccattaatgtaatcagtctagcactgggagacattttacaatatgcctcagttgaccccactgtgtacagggtccatgatgctctattccatgttgatttctgcttaggaaggatctttattgtgagattcctttatacttgattgaaatattataattctttcctcatcatgatccaaggctgacatcccaccccagaggaccaattcttcctccctttacacaccagctcgatgggaacacaaagttttagaggtggaaggggcctcacaatctgctttattttacagatggagaacctaaagtccagaggattttagcaacttgtctaatgtcatccagttactaggaagggatccaagactgggatccccattgtgctgaccatcaagctcaggtctctccactgttccctcccatctaatcttttctgcccagactcatcttacaggaggaaggggtgcccctctacatagtgcagtttgaaggaatattggacagaaccccgctgcctgtcactccattatctttttattcctttaacttggacagctttggttctttaagtcatttattataagacaatatactttaatgagtactctagcagggaatgggaataatggtgtatgtgtctgataaaagagtttgagattattggcaaaatagaagttaagggcaaaaaaagcttctagactgaagtgcttcgtgaactttaaagtatgcccagatctcctaggatcttgttaaaatgaagattctgatccaataagtctgaggcagggcctgagactgtgcatttctagaaagctcttaggtgatattgatgctgctggtccaggaaaccctctttgagtagcaaatggctggaacatctctccaggagggcttcctgtgatgatggaatgctctgtatctataccgtccaagacatcagccactagccacatgtggctattcagcagctgcaatgtgggtagtgctgctaaggaaataaattttaaattttatttaatttaaattaattaaatgtggccaatggcaaatggccagcacaggtcttgagaagaggatctatgtcctatttagctctgcatcttttagattggtggttgtcaataaatatttgttatgtgaaaggagcatggttgcctgaggcaggggctgaaagacacagctcaaatattatttgttcctaggaactgtgtttaggtaatgtggcatagcggataagaccacagagtctagagcttgccagactggatttgaatatgggctctgccatttattaactgtgtcaccttgattttccgtgcttcagtttcttcatctgtaaaatggaaatgaaataatatctgtcttatagaattgtgtgtatgcatggaatgatttaatatctgtaaaattcttaggattcttctagaacatattgagttctgccatgtccatatggtcttaccaaggtagaaccttgcctgaattaagcccttaagtatctttgcattcttttcacctctcagaaaaactgaggactacacgtgagctcccaggtttttggcggaagggattctttcatgctgcggatgctcctttggacaattaaatcttgttgtgttgtaaatccaaaagtgtttaaccaaaccccatccctaaatggaggtaattcaccagtgaaagcgtctggtgtgagcaggagaagcgagctgctgaaacaatgagatcagccttcagaaccaaacagggtaatgatagctggccccacagaagatacgactgctaggaaattctgcacccgtgtttatacaaaaccaagcaggaaatgtttgccagtggaataaataaagaagccttctggttacataatgcttcgtggtgccctagtttgaggccgttttggaatggttgctgggtctaggtttgaattttggagctcaggctgcttgtctcctcttttgtttgcttacttcagacactcgaagcatcattcttctccggttccctaaaggcctgagtgaacgctggaccaggacgtgacttcatcgctctggcttaagacagccctcatgttctacttcatttctgaacccctgaccctgggatacatttagaatggggcagaggctgatggactgggggtggtggggctcagggccaattttcccatgtgcctagagaaagggaagctctattattcctaaaaacacatccaatcattgagatccagatatgtgccaagcatgatgccaggcacggtcccaggctctcccaaccttgcaatgtaagcaattattatcttcagataccgagtggttttaagtaacacgttctgggtcagaagctagggtgggttggcctccaagtcgctgctttttctcctctgttaaactacctttcctggattagaaacaaaagcagatatttcaactcagttgcctgtgtgcccctgtgtagcccaggagagcaaaggattctttacggggaaaaaaaatctaattgtaaaaattcaaaagaaaattcttatgagtcaaccaattttaatttgtatagatgagtaaatttgttattgcacactttaaacttctcagtaccctgaaaagagagtcaccatctccctaccctagtgcacattttatgaaagcatttatagagcacctgctggataccatggctgcctgttggtcctgggaagcaagtgcagcaagggcaaaggcctcacttggatctgacagactgatgagcttggtgaaacccagtttttctggcctgagtcttggtttaaggaaaaaaaaatgttatggttctggagccctctgaaattctagggtgtggtgaactcggtgaggatttaggcctctctagataaaaattgtgctctctggtctcttatctcctggggaggctcttgcagcccattcagaaattctagaacagttgagaaagcagacacctctcagtatctagtgggactgaaggagaacaaaagggaagacagaagtggtaagtgtagtgatatctaatgttgcctggtcttcggctaaatctccagtactgttgtaagcgtgatacctggactgcatttacttgtttagttaattactccagtgatttagagcagtaggtggggcatgtgtgtgaacccaggaagctaagagggtggacaagggtttgcaagtggatggaaaaggatgctttcagtctgagtggctggctgactaagtgatttgaggttcacagtggtggcccccaaatttctgattagaagggctcagaagcctgcagttcagttggaaaaggtgtatggaaccagttttgaagcttctttgcttgacacacaaatggtttttgcatagtgtgtatgtttattagtagggggatgtctgtcggtactgtcggtagagattgtggggctggactcctgcttataaagctattccatggtactgccgattggtcttcagcagatcttctgcataccaggggcaaagtatctgaaattacatcagacaaatgataaagtacatcaaataaatgaagactaatttattaatgttttgcatttgctctgcaggtttgctttttctttctttctttctttttgagacggagtcttgctctgtcgcccaggctgaagtgcaaggtttgctttttctaactttattctttgaggattaatttacattcagtgaaatgcacagatctgaagtatacagtttgagttttgacaaatatatactcccatggatccaccaccatagtcaagatttagaacattttcatctccctagaatgtccctttctgccccattctagtcaattcctccccctccatccaccccaggtaaccaatgttctgatttttatcactagagattagttttacctgatctagaatttcatataaatggagtccaacaatattcactactttgagtctggcttccctcacttagtgttatcttcttgaagttcatccacattgttgtgtgtatcaagagtttattccttttaactactgaatagtatgccactgtatgattataccacactttaaacatctaatcttgctgatggacatttgagttatttcttatttttggccattgcaaataaaactggtatgaaagttcatgtacaagacttttgttggcagatgcacttatttcttttgtgtagatacccagtagtggaattgctgggtcagagggaaagtgtatgttttatgtcataagaaaccaccaagcagttttccaaggcagttgtgccatttcacgctcttactcaagactttctctcaaacaattagcagcacagaaaggcggacttttgtactactttctctcaccacccccatctcctttttgccttgtcaaaccagtcaactctagaaaacttgaacatatggcaggactcaataatacacattcagattatttaggctctccattttctcattcattctgtgaaaaaaatcattgtcactagacacaaagaaatgaaagggtggacttcaaaatccagggagaaagcaacaactaacttcgtacttaatggtggctattaaatcaccttcagatcatgaaaaaagcaaaaatatttactctggccaattccattaacattgtactatagttcataccagtgccataaggcaagaaaaagaaaaacaggcatagagattgaaaagaagaatacaactctttactcacaaatggcatttttatctatgtaacaatcctgagaaattgacacaaaagcttctagaactaatatgtaagtgtagcaagatttcagtactcaaggttgatatacaaaatcaatagtatttgtgtatccaacagcaaacaattgaaaataaaattaaaaataccatttaaagtagcgtcaaaaagcataacatacttaaacttatttctaacaaaatgtgcaagacttgtacacaaaaatacaaaacatttcagtcatggaagacctaataaatggaaaactatgccacatgcatggtttagaaaactcaatatcattaagatgtcagttcttctcaaattgctctctagcaggaattggcaaatattttgtgtaaagggacagacaataaatattttaggttttgtaggctatatgatattaattgtggctattaaaccctgcctttgcaatgcaaaagtatagataatatgtaaatgaacaagtgtggctgtgtctccataaaacttcatttacaaaaacaggtggggggctagattgtccctcttctattgcacataaactgaaaaacaagaggtaaaaccagagggactctagggtggcttccaactttgtctttttctaattgtgctagagaaagagagaatataagttatacctgcttctttggctgctaattctcttgccaaccttatcttcatatataaaaggtgagtattaagtctacttggtagtgttgacggggggattaagtgaaataatgtaaaaatctgggacgatgtcagacttgttcaaagatattcacacttcccctgctctctgttatattttcccatttgttttcagaatttagctttaaggtttgggaatccaaatactgttttcaatcaagcagccaaggcttcagatgacaagcttgtgtgtgtttggaaaacgtggcctcatgatgtgcacacctaggactggtgcagctgtcatactgccatttcttagtgtagggtgctggggtttgaattttgataatccctgtgggacacctcagaaggactaggctttatctccaaaggggtcacagtgagtagagttttggctttatctccaaaggggtcacagtgagtagagtttaggatgccatggggttgcagtccagaatcaccaggcacctagtcccatttcttttttaagaagacatgctgcttcttgtaaacattacactccagcctcccggcataatcccaaataatgtcatttctgggaaaagttgataagtggtgagaatttaagccttttcatctgttgggaataaaagtgggtagacatgcagaagttttcttctaccttacatagttgcacctcctcggcattcactttcctttcactttctggaattgagctggccagagatgaggatcggtatgctgcttccttcagccctgccctgtgtggcgtttgtcttgcaactttcccatgcttgtttcaacaggaaaaaaagcaaagagattgacatatagctaccccgaggctagattgtcaccgaaatagatttctccaaataaaaataagggccgtttttgcttgcaaggccttgcaatgaaacagagttaataaaaactgcatgggaaactcacattgcagctataaaaatattaaaaaatagaattcttagctaaagtcagcagtgattgttggctcgaggtagaaattagggagtaaaacattctgaaacactcattgaaagtgaagagagggaagaattattaccctttatccatttggttaacccttcagaagtaaagctagagtcacacttgcttagcaagtgattaagtactgggtttttaagcgtaggacagaccattttctcctgtggctaacctgtaacaaacagaaaatagggccacttaaaaattagcacaaacatatataagaaacaaagctgctccaacaggaaaacttggtaagatcattgacgaaaacgtctacagcttcattcgttcttctccttcagcctctgtccctgtgtgtgtatatcagatgtctctgaggttaaagcttgtgtgtcctcctgggctggagtacagggacacccttcatcactctccagtccccagtgcccagtgtcatcatctggaatatcttctggaaccctggagggatggtttgtttctacagctccccactagcaggggtctttcctctaagaatggtgcttccaggatctctccaggctcagtttcaggcgccactagatcatcagggaatggtgattgattatctgagaaatgtatctatttgcattcaggattcaccaagtcactattctaatgggaactcactaatt
